(19) United States
(12) Patent Application Publication
(10) Pub. No.: US 2023/0310485 A1
(43) Pub. Date: Oct. 5, 2023

(54) POLYNUCLEOTIDE AGENTS TARGETING ANGIOTENSINOGEN (AGT) AND METHODS OF USE THEREOF

(71) Applicant: Alnylam Pharmaceuticals, Inc., Cambridge, MA (US)

(72) Inventor: Gregory Hinkle, Plymouth, MA (US)

(21) Appl. No.: 17/898,876

(22) Filed: Aug. 30, 2022

Related U.S. Application Data
(63) Continuation of application No. 16/891,155, filed on Jun. 3, 2020, now abandoned.
Application No. 16/891,155 is a division of application No. 15/578,955, filed on Dec. 1, 2017, now Pat. No. 10,709,728.
(60) Provisional application No. 62/169,055, filed on Jun. 1, 2015.

(51) Int. Cl. A61K 31/712; A61K 31/7125; C12N 15/113; A61P 9/12; A61K 9/00; A61K 31/7115

(52) U.S. Cl. CPC A61K 31/712; A61K 9/0019; A61K 31/7115; A61K 31/7125; A61P 9/12; C12N 15/1136; A61K 2300/00; C12N 2310/11; C12N 2310/315; C12N 2310/3341; C12N 2310/351

(57) ABSTRACT

The invention relates to polynucleotide agents, e.g., antisense polynucleotide agents, targeting an angiotensinogen (AGT) gene, and methods of using such polynucleotide agents to inhibit expression of AGT and to treat subjects having an AGT-associated disease, e.g., hypertension.

### RELATED APPLICATIONS

[0001] This application is a continuation of U.S. Pat. Application No. 16/891,155, filed on Jun. 3, 2020, which is a divisional of U.S. Pat. Application No. 15/578,955, filed on Dec. 1, 2017, now U.S. Pat. No. 10,709,728, issued on Jul. 14, 2020, which is a 35 U.S.C. § 371 national stage filing of International Application No. PCT/US2016/034062, filed on May 25, 2016, which in turn claims the benefit of priority to U.S. Provisional Pat. Application No. 62/169,055, filed on Jun. 1, 2015. The entire contents of each of the foregoing applications are incorporated herein by reference.

### SEQUENCE LISTING

[0002] The instant application contains a Sequence Listing which has been submitted electronically in XML format and is hereby incorporated by reference in its entirety. Said XML copy, created on Mar. 24, 2023, is named 121301-03505_SL.xml and is 3,267,659 bytes in size.

### BACKGROUND OF THE INVENTION

[0003] The renin-angiotensin-aldosterone system (RAAS) plays a crucial role in the regulation of blood pressure. The RAAS cascade begins with the release of renin by the juxtaglomerular cells of the kidney into the circulation. Renin secretion is stimulated by several factors, including Na+ load in the distal tubule, β-sympathetic stimulation, and/or reduced renal perfusion. Active renin in the plasma cleaves angiotensinogen (produced by the liver) to angiotensin I, which is then converted by circulating and locally expressed angiotensin-converting enzyme (ACE) to angiotensin II. Most of the effects of angiotensin II on the RAAS are exerted by its binding to angiotensin II type 1 receptors (AT₁R), leading to arterial vasoconstriction, tubular and glomerular effects, such as enhanced Na+ reabsorption or modulation of glomerular filtration rate. In addition, together with other stimuli such as adrenocorticotropin, anti-diuretic hormone, catecholamines, endothelin, serotonin, and levels of Mg2+ and K+, AT₁R stimulation leads to aldosterone release which, in turn, promotes Na+ and K+ excretion in the renal distal convoluted tubule.

[0004] Dysregulation of the RAAS leading to, for example, excessive angiotensin II production and/or AT₁R stimulation results in hypertension which can lead to, e.g., increased oxidative stress, promotion of inflammation, hypertrophy, and fibrosis in the heart, kidneys, and arteries, and result in, e.g., left ventricular fibrosis, arterial remodeling, and glomerulosclerosis.

[0005] Hypertension is the most prevalent, controllable disease in developed countries, affecting 20-50% of adult populations. It is a major risk factor for various diseases, disorders and conditions such as, shortened life expectancy, chronic kidney disease, stroke, myocardial infarction, heart failure, aneurysms (e.g. aortic aneurysm), peripheral artery disease, heart damage (e.g., heart enlargement or hypertrophy) and other cardiovascular related diseases, disorders and/or conditions. In addition, hypertension has been shown to be an important risk factor for cardiovascular morbidity and mortality accounting for, or contributing to, 62% of all strokes and 49% of all cases of heart disease.

[0006] Despite the number of anti-hypertensive drugs available for treating hypertension, more than two-thirds of subjects are not controlled with one anti-hypertensive agent and require two or more anti-hypertensive agents selected from different drug classes. This further reduces the number of subjects with controlled blood pressure as compliance and side-effects increase with increasing medication.

[0007] Accordingly, there is a need in the art for alternative therapies and combination therapies for subjects having an angiotensinogen-associated disease.

### SUMMARY OF THE INVENTION

[0008] The present invention provides polynucleotide agents and compositions comprising such agents which which target nucleic acids encoding angiotensinogen (AGT) and interfere with the normal function of the targeted nucleic acid. The AGT nucleic acid may be within a cell, e.g., a cell within a subject, such as a human. The present invention also provides methods and combination therapies for treating a subject having a disorder that would benefit from inhibiting or reducing the expression of a AGT mRNA, e.g., an angiotensinogen-associated disease, such as hypertension, using the polynucleotide agents and compositions of the invention.

[0009] Accordingly, in one aspect, the present invention provides antisense polynucleotide agents for inhibiting expression of an angiotensinogen (AGT) gene. The agents include about 4 to about 50 contiguous nucleotides, wherein at least one of the contiguous nucleotides is a modified nucleotide, and wherein the nucleotide sequence of the agent is about 80%, about 81%, about 82%, about 83%, about 84%, about 85%, about 86%, about 87%, about 88%, about 89%, about 90%, about 91%, about 92%, about 93%, about 94%, about 95%, about 96%, about 97%, about 98%, about 99%,or about 100% complementary over its entire length to the equivalent region of the nucleotide sequence of any one of SEQ ID NOs:1-4.

[0010] In one embodiment, the equivalent region is selected from the group consisting of nucleotides 1223-1296, 1596-1626, 1727-1813, 1727-1770, 1772-1813, 1838-1868, 2091-2120, 2200-2243, 2321-2340, 474-493, 981-1000, 1003-1022, 1167-1186, 1223-1242, 1234-1253, 1245-1264, 1254-1273, 1277-1296, 1596-1615, 1607-1626, 1727-1746, 1740-1759, 1751-1770, 1772-1791, 1784-1803, 1794-1813, 1838-1857, 1849-1868, 1893-1912, 2091-2110, 2101-2120, 2125-2144, 2146-2165, 2200-2219, 2213-2232, 2224-2243, 2256-2275, 2310-2329, and 2321-2340 of SEQ ID NO:1.

[0011] In another aspect, the present invention provides antisense polynucleotide agents for inhibiting expression of an angiotensinogen (AGT) gene. The agents include at least 8 contiguous nucleotides differing by no more than 3 nucleotides from any one of the target nucleotide sequences of SEQ ID NO:1 provided in Table 3 and are about 8 to about 50 nucleotides in length.

[0012] In one aspect, the present invention provides antisense polynucleotide agents for inhibiting expression of an angiotensinogen (AGT) gene. The agents include at least 8 contiguous nucleotides differing by no more than 3 nucleotides from any one of nucleotides 1223-1296, 1596-1626, 1727-1813, 1727-1770, 1772-1813, 1838-1868, 2091-2120, 2200-2243, 2321-2340, 474-493, 981-1000, 1003-1022, 1167-1186, 1223-1242, 1234-1253, 1245-1264, 1254-1273, 1277-1296, 1596-1615, 1607-1626, 1727-1746, 1740-1759, 1751-1770, 1772-1791, 1784-1803, 1794-1813, 1838-1857, 1849-1868, 1893-1912, 2091-2110, 2101-2120, 2125-2144, 2146-2165, 2200-2219, 2213-2232, 2224-2243, 2256-2275, 2310-2329, or 2321-2340 of SEQ ID NO:1.

[0013] In some embodiments, substantially all of the nucleotides of the antisense polynucleotide agents of the invention are modified nucleotides. In other embodiments, all of the nucleotides of the antisense polynucleotide agent are modified nucleotides.

[0014] The antisense polynucleotide agent may be 10 to 40 nucleotides in length; 10 to 30 nucleotides in length; 18 to 30 nucleotides in length; 10 to 24 nucleotides in length; 18 to 24 nucleotides in length; or 20 nucleotides in length.

[0015] In one embodiment, the modified nucleotide comprises a modified sugar moiety selected from the group consisting of a 2′-O-methoxyethyl modified sugar moiety, a 2′-methoxy modified sugar moiety, a 2′-O-alkyl modified sugar moiety, and a bicyclic sugar moiety.

[0016] In one embodiment, the bicyclic sugar moiety has a (—CH2—)n group forming a bridge between the 2′-oxygen and the 4′-carbon atoms of the sugar ring, wherein n is 1 or 2.

[0017] In another embodiment, the modified nucleotide is a 5-methylcytosine.

[0018] In one embodiment, the modified nucleotide comprises a modified internucleoside linkage, such as a phosphorothioate internucleoside linkage.

[0019] In one embodiment, an agent of the invention comprises one 2′-deoxynucleotide. In another embodiment, an agent of the invention comprises one 2′-deoxynucleotide flanked on each side by at least one nucleotide having a modified sugar moiety.

[0020] In one embodiment, an agent of the invention comprises a plurality, e.g., more than 1, e.g., 2, 3, 4, 5, 6, or 7, 2′-deoxynucleotides. In one embodiment, an agent of the invention comprises a plurality, e.g., more than 1, e.g., 2, 3, 4, 5, 6, or 7, 2′-deoxynucleotides flanked on each side by at least one nucleotide having a modified sugar moiety.

[0021] In one embodiment, the agent is a gapmer comprising a gap segment comprised of linked 2′-deoxynucleotides positioned between a 5′ and a 3′ wing segment.

[0022] In one embodiment, the modified sugar moiety is selected from the group consisting of a 2′-O-methoxyethyl modified sugar moiety, a 2′-methoxy modified sugar moiety, a 2′-O-alkyl modified sugar moiety, and a bicyclic sugar moiety.

[0023] In one embodiment, the 5′-wing segment is 1 to 6 nucleotides in length, e.g., 2, 3, 4, or 5 nucleotides in length.

[0024] In one embodiment, the 3′-wing segment is 1 to 6 nucleotides in length, e.g., 2, 3, 4, or 5 nucleotides in length.

[0025] In one embodiment, the gap segment is 5 to 14 nucleotides in length, e.g., 6, 7, 8, 9, 10, 11, 12, or 13 nucleotides in length. In one embodiment, the gap segment is 10 nulcoeitdes in length.

[0026] In one aspect, the present invention provides antisense polynucleotide agents for inhibiting expression of an angiotensinogen (AGT) gene. The agents include a gap segment consisting of linked deoxynucleotides; a 5′-wing segment consisting of linked nucleotides; a 3′-wing segment consisting of linked nucleotides; wherein the gap segment is positioned between the 5′-wing segment and the 3′-wing segment and wherein each nucleotide of each wing segment comprises a modified sugar.

[0027] In one embodiment, the gap segment is ten 2′-deoxynucleotides in length and each of the wing segments is five nucleotides in length.

[0028] In another embodiment, the gap segment is ten 2′-deoxynucleotides in length and each of the wing segments is four nucleotides in length.

[0029] In yet another embodiment, the gap segment is ten 2′-deoxynucleotides in length and each of the wing segments is three nucleotides in length.

[0030] In another embodiment, the gap segment is ten 2′-deoxynucleotides in length and each of the wing segments is two nucleotides in length.

[0031] In one embodiment, the modified sugar moiety is selected from the group consisting of a 2′-O-methoxyethyl modified sugar moiety, a 2′-methoxy modified sugar moiety, a 2′-O-alkyl modified sugar moiety, and a bicyclic sugar moiety.

[0032] In some embodiments, the agents of the invention further comprise a ligand.

[0033] In one embodiment, the agent is conjugated to the ligand at the 3′-terminus.

[0034] In one embodiment, the ligand is an N-acetylgalactosamine (GalNAc) derivative.

[0035] In one embodiment, the ligand is

[chemical structure]

[0036] In one aspect, the present invention provides pharmaceutical compositions for inhibiting expression of an angiotensinogen (AGT) gene comprising an agent of the invention.

[0037] In one embodiment, the agent is present in an unbuffered solution, such as saline or water.

[0038] In another embodiment, the agent is is present in a buffer solution, such as a buffer comprising acetate, citrate, prolamine, carbonate, or phosphate or any combination thereof.

[0039] In one embodiment, the buffer solution is phosphate buffered saline (PBS).

[0040] In another aspect, the present invention provides pharmaceutical composition comprising an agent of the invention and a lipid formulation, such as a lipid formulation comprising an LNP or a MC3.

[0041] In one aspect, the present invention provides methods of inhibiting expression of an angiotensinogen (AGT) gene in a cell. The methods include contacting the cell with an agent of the invention or a pharmaceutical composition of the invention, thereby inhibiting expression of the AGT gene in the cell.

[0042] In one embodiment, the cell is within a subject.

[0043] In one embodiment, the subject is a human.

[0044] In one embodiment, the AGT expression is inhibited by at least about 30%, about 40%, about 50%, about 60%, about 70%, about 80%, about 90%, about 95%, about 98% or about 100%.

[0045] In another aspect, the present invention provides methods of treating a subject having a disease or disorder that would benefit from reduction in angiotensinogen (AGT) expression. The methods include administering to the subject a therapeutically effective amount of an agent of the invention or a pharmaceutical composition of the invention, thereby treating the subject.

[0046] In yet another aspect, the present invention provides methods of preventing at least one symptom in a subject having a disease or disorder that would benefit from reduction in angiotensinogen (AGT) expression. The methods include administering to the subject a prophylactically effective amount of an agent of the invention or a pharmaceutical composition of the invention, thereby preventing at least one symptom in the subject having a disorder that would benefit from reduction in AGT expression.

[0047] In one embodiment, the administration of the antisense polynucleotide agent to the subject causes a decrease in hypertension and/or a decrease in AGT protein levels.

[0048] In one embodiment, the disorder is an AGT-associated disease.

[0049] In certain embodiments, the AGT-associated disease is selected from the group consisting of of hypertension, hypertensive heart disease, hypertensive nephropathy, pregnancy-associated hypertension, atherosclerosis, arteriosclerosis, chronic kidney disease, glomerulosclerosis, coarctation of the aorta, aortic aneurism, ventricular fibrosis, Cushing’s syndrome, and other glucocorticoid excess states including chronic steroid therapy, pheochromocytoma, primary aldosteronism and other mineralocorticoid excess states, sleep apnea, thyroid/parathyroid disease, heart failure, myocardial infarction, stroke, diabetes mellitus, renal failure, and systemic sclerosis. In certain embodiments, the angiotensinogen-associated disease is pregnancy-associated hypertension (e.g., pregnancy-induced hypertension, preeclampsia, and eclampsia) and administration of an agent of the invention to the subject results in a decrease in maternal blood pressure; a decrease in maternal albuminuria; an increase in uteroplacental unit weight; an increase in fetal weight; normalization of the fetal brain:liver ratio; a decrease in hAGT mRNA expression in the maternal liver and no significant decrease in AGT mRNA expression in the placenta; an increase in overall placenta size; an increase in the size of the villous placenta; no significant change in the size of the trophospongium of the placenta; a reduction in the ratio of sFLT1:PLGF mRNA expression in the maternal kidney; a reduction in the ratio of serum sFLT1:PLGF levels; and/or a decrease in the level of agonistic autoantibodies to AT1.

[0050] In certain embodiments the subject is human.

[0051] In certain embodiments, the methods further comprise administering to the subject an additional therapeutic agent. In some embodiments, the additional therapeutic agent is selected from the group consisting of a diuretic, an angiotensin converting enzyme (ACE) inhibitor, an angiotensin II receptor antagonist, a beta-blocker, a vasodialator, a calcium channel blocker, an aldosterone antagonist, an alpha₂-agonist, a renin inhibitor, an alpha-blocker, a peripheral acting adrenergic agent, a selective D1 receptor partial agonist, a nonselective alpha-adrenergic antagonist, a synthetic, steroidal antimineralocorticoid agent, or a combination of any of the foregoing, and a hypertension therapeutic agent formulated as a combination of agents.

[0052] In certain embodiments, the agent is administered at a dose of about 0.01 mg/kg to about 10 mg/kg or about 0.5 mg/kg to about 50 mg/kg.

[0053] In certain embodiments, the agent is administered at a dose of about 10 mg/kg to about 30 mg/kg.

[0054] In certain embodiments, the agent is administered to the subject once a week.

[0055] In alternative embodiments, the agent is administered to the subject twice a week.

[0056] In yet other embodiments, the agent is administered to the subject twice a month.

[0057] In certain embodiments, the agent is administered to the subject subcutaneously.

[0058] In certain embodiments, the methods of the invention further include measuring blood pressure and/or AGT levels in the subject.

### BRIEF DESCRIPTION OF THE DRAWINGS

[0059] FIG. 1 is a schematic of the renin-angiotensin-aldosterone system (RAAS) including an indication of the various points in the sytem which have been the targets for therapeutic intervention (from Zaman, et al. (2002) Nat Rev Drug Disc 1:621).

### DETAILED DESCRIPTION OF THE INVENTION

[0060] The present invention provides polynucleotide agents, e.g., antisense polynucleotide agents, and compositions comprising such agents which target nucleic acids encoding angiotensinogen (AGT) (e.g., mRNA encoding AGT as provided in, for example, any one of SEQ ID NOs:1-4). The polynucleotide agents bind to nucleic acids encoding AGT via, e.g.,Watson-Crick base pairing, and interfere with the normal function of the targeted nucleic acid.

[0061] The antisense polynucleotide agents of the invention include a nucleotide sequence which is about 4 to about 50 nucleotides or less in length and which is about 80% complementary to at least part of an mRNA transcript of an AGT gene. The use of these antisense polynucleotide agents enables the targeted inhibition of RNA expression and/or activity of an AGT gene in mammals.

[0062] The present inventors have demonstrated that antisense polynucleotide agents targeting AGT can mediate antisense inhibition in vitro resulting in significant inhibition of expression of an AGT gene. Thus, methods and compositions including these antisense polynucleotide agents are useful for treating a subject who would benefit by a reduction in the levels and/or activity of an AGT protein, such as a subject having an AGT-associated disease, such as hypertension.

[0063] The present invention also provides methods and combination therapies for treating a subject having a disorder that would benefit from inhibiting or reducing the expression of an AGT gene, e.g., an AGT-associated disease, such as hypertension using the antisense polynucleotide agents and compositions of the invention.

[0064] The present invention also provides methods for preventing at least one symptom, e.g., hypertension, in a subject having a disorder that would benefit from inhibiting or reducing the expression of an AGT gene, e.g., hypertension. The present invention further provides compositions comprising antisense polynucleotide agents which effect antisense inhibition of an AGT gene. The AGT gene may be within a cell, e.g., a cell within a subject, such as a human.

[0065] The combination therapies of the present invention include administering to a subject having an AGT-associated disease, an antisense polynucleotide agent of the invention and an additional therapeutic, such as a diuretic, an angiotensin converting enzyme (ACE) inhibitor, an angiotensin II receptor antagonist, a beta-blocker, a vasodialator, a calcium channel blocker, an aldosterone antagonist, an alpha₂-agonist, a renin inhibitor, an alpha-blocker, a peripheral acting adrenergic agent, a selective D1 receptor partial agonist, a nonselective alpha-adrenergic antagonist, a synthetic, steroidal antimineralocorticoid agent, or a combination of any of the foregoing, and a hypertension therapeutic agent formulated as a combination of agents. The combination therapies of the invention reduce AGT levels in the subject (e.g., by about 30%, 35%, 40%, 45%, 50%, 55%, 60%, 65%, 70%, 75%, 80%, 85%, 90%, 95%, or about 99%) by targeting AGT mRNA with an antisense polynucleotide agent of the invention and, accordingly, allow the therapeutically (or prophylactically) effective amount of the additional therapeutic agent(s) required to treat the subject to be reduced, thereby decreasing the costs of treatment and permitting easier and more convenient ways of administering certain agents, or decreasing side effects of certain agents.

[0066] The following detailed description discloses how to make and use antisense polynucleotide agents to inhibit the mRNA and/or protein expression of an AGT gene, as well as compositions, uses, and methods for treating subjects having diseases and disorders that would benefit from inhibition and/or reduction of the expression of this gene.

### I. Definitions

[0067] In order that the present invention may be more readily understood, certain terms are first defined. In addition, it should be noted that whenever a value or range of values of a parameter are recited, it is intended that values and ranges intermediate to the recited values are also intended to be part of this invention.

[0068] The articles “a” and “an” are used herein to refer to one or to more than one (i.e., to at least one) of the grammatical object of the article. By way of example, “an element” means one element or more than one element, e.g., a plurality of elements.

[0069] The term “including” is used herein to mean, and is used interchangeably with, the phrase “including but not limited to”.

[0070] The term “or” is used herein to mean, and is used interchangeably with, the term “and/or,” unless context clearly indicates otherwise.

[0071] The term “about” is used herein to mean within the typical ranges of tolerances in the art. As used herein, “angiotensinogen,” used interchangeably with the term “AGT” refers to the well-known gene and polypeptide, also known in the art as Serpin Peptidase Inhibitor, Clade A, Member 8; Alpha-1 Antiproteinase; Antitrypsin; SERPINA8; Angiotensin I; Serpin A8; Angiotensin II; Alpha-1 Antiproteinase angiotensinogen; antitrypsin; pre-angiotensinogen2; ANHU; Serine Proteinase Inhibitor; and Cysteine Proteinase Inhibitor.

[0072] The term “AGT” includes human AGT, the amino acid and complete coding sequence of which may be found in for example, GenBank Accession No. GI:188595658 (NM_000029.3; SEQ ID NO:1); Macaca fascicularis AGT, the amino acid and complete coding sequence of which may be found in for example, GenBank Accession No. GI: 90075391 (AB170313.1: SEQ ID NO:2); mouse (Mus musculus) AGT, the amino acid and complete coding sequence of which may be found in for example, GenBank Accession No. GI: 113461997 (NM_007428.3; SEQ ID NO:3); and rat AGT (Rattus norvegicus) AGT the amino acid and complete coding sequence of which may be found in for example, for example GenBank Accession No. GI:51036672 (NM_134432; SEQ ID NO:4).

[0073] Additional examples of AGT mRNA sequences are readily available using publicly available databases, e.g., GenBank, UniProt, OMIM, and the Macaca genome project web site.

[0074] The term “AGT,” as used herein, also refers to naturally occurring DNA sequence variations of the AGT gene, such as a single nucleotide polymorphism (SNP) in the AGT gene. Exemplary SNPs may be found in the dbSNP database available at www.ncbi.nlm.nih.gov/projects/SNP/snp_ref.cgi?geneId=183. Non-limiting examples of sequence variations within the AGT gene include, for example, those described in U.S. Pat. No. 5,589,584, the entire contents of which are incorporated herein by reference. For example, sequence variations within the AGT gene may include as a C→T at position -532 (relative to the transcription start site); a G→A at position -386; a G→A at position -218; a C→T at position -18; a G→A and a A→C at position -6 and -10; a C→T at position +10 (untanslated); a C→T at position +521 (T174M); a T→C at position +597 (P199P); a T→C at position +704 (M235T; also see, e.g., Reference SNP (refSNP) Cluster Report: rs699, available at www.ncbi.nlm.nih.gov/SNP); a A→G at position +743 (Y248C); a C→T at position +813 (N271N); a G→A at position +1017 (L339L); a C→A at position +1075 (L359M); and/or a G→A at position +1162 (V388M).

[0075] As used herein, “target sequence” refers to a contiguous portion of the nucleotide sequence of an mRNA molecule formed during the transcription of an AGT gene, including mRNA that is a product of RNA processing of a primary transcription product.

[0076] As used herein, “target nucleic acid” refers to a nucleic acid molecule to which an antisense polynucleotide agent of the invention specifically hybridizes.

[0077] The terms “antisense polynucleotide agent” “antisense compound”, and “agent” as used interchangeably herein, refer to an agent comprising a single-stranded oligonucleotide that contains RNA as that term is defined herein, and which targets nucleic acid molecules encoding AGT (e.g., mRNA encoding AGT as provided in, for example, any one of SEQ ID NOs:1-4). The antisense polynucleotide agents specifically bind to the target nucleic acid molecules via hydrogen bonding (e.g., Watson-Crick, Hoogsteen or reversed Hoogsteen hydrogen bonding) and interfere with the normal function of the targeted nucleic acid (e.g., by an antisense mechanism of action). This interference with or modulation of the function of a target nucleic acid by the polynucleotide agents of the present invention is referred to as “antisense inhibition.”

[0078] The functions of the target nucleic acid molecule to be interfered with may include functions such as, for example, translocation of the RNA to the site of protein translation, translation of protein from the RNA, splicing of the RNA to yield one or more mRNA species, and catalytic activity which may be engaged in or facilitated by the RNA.

[0079] In some embodiments, antisense inhibition refers to “inhibiting the expression” of target nucleic acid levels and/or target protein levels in a cell, e.g., a cell within a subject, such as a mammalian subject, in the presence of the antisense polynucleotide agent complementary to a target nucleic acid as compared to target nucleic acid levels and/or target protein levels in the absence of the antisense polynucleotide agent. For example, the antisense polynucleotide agents of the invention can inhibit translation in a stoichiometric manner by base pairing to the mRNA and physically obstructing the translation machinery, see Dias, N. et al., (2002) Mol Cancer Ther 1:347-355.

[0080] As used herein, the term “specifically hybridizes” refers to an antisense polynucleotide agent having a sufficient degree of complementarity between the antisense polynucleotide agent and a target nucleic acid to induce a desired effect, while exhibiting minimal or no effects on non-target nucleic acids under conditions in which specific binding is desired, e.g., under physiological conditions in the case of in vivo assays and therapeutic treatments.

[0081] A target sequence may be from about 4-50 nucleotides in length, e.g., 8-45, 10-45, 10-40, 10-35, 10-30, 10-20, 11-45, 11-40, 11-35, 11-30, 11-20, 12-45, 12-40, 12-35, 12-30, 12-25, 12-20, 13-45, 13-40, 13-35, 13-30, 13-25, 13-20, 14-45, 14-40, 14-35, 14-30, 14-25, 14-20, 15-45, 15-40, 15-35, 15-30, 15-25, 15-20, 16-45, 16-40, 16-35, 16-30, 16-25, 16-20, 17-45, 17-40, 17-35, 17-30, 17-25, 17-20, 18-45, 18-40, 18-35, 18-30, 18-25, 18-20, 19-45, 19-40, 19-35, 19-30, 19-25, 19-20, e.g., 4, 5, 6, 7, 8, 9, 10, 11, 12, 13, 14, 15, 16, 17, 18, 19, 20, 21, 22, 23, 24, 25, 26, 27, 28, 29, 30, 31, 32, 33, 34, 35, 36, 37, 38, 39, 40, 41, 42, 43, 44, 45, 46, 47, 48, 49, or 50 contiguous nucleotides of the nucleotide sequence of an mRNA molecule formed during the transcription of an AGT gene. Ranges and lengths intermediate to the above recited ranges and lengths are also contemplated to be part of the invention.

[0082] The terms “complementary,” “fully complementary” and “substantially complementary” are used herein with respect to the base matching between an antisense polynucleotide agent and a target sequence. The term “complementarity” refers to the capacity for pairing between nucleobases of a first nucleic acid and a second nucleic acid.

[0083] As used herein, an antisense polynucleotide agent that is “substantially complementary to at least part of” a messenger RNA (mRNA) refers to an antisense polynucleotide agent that is substantially complementary to a contiguous portion of the mRNA of interest (e.g., an mRNA encoding AGT). For example, a polynucleotide is complementary to at least a part of an AGT mRNA if the sequence is substantially complementary to a non-interrupted portion of an mRNA encoding AGT.

[0084] As used herein, the term “region of complementarity” refers to the region of the antisense polynucletiode agent that is substantially complementary to a sequence, for example a target sequence, e.g., an AGT nucleotide sequence, as defined herein. Where the region of complementarity is not fully complementary to the target sequence, the mismatches can be in the internal or terminal regions of the molecule. Generally, the most tolerated mismatches are in the terminal regions, e.g., within 5, 4, 3, or 2 nucleotides of the 5′- and/or 3′-terminus of the antisense polynucleotide.

[0085] As used herein, and unless otherwise indicated, the term “complementary,” when used to describe a first nucleotide sequence in relation to a second nucleotide sequence, refers to the ability of a polynucleotide comprising the first nucleotide sequence to hybridize and form a duplex structure under certain conditions with the second nucleotide sequence, as will be understood by the skilled person. Such conditions can, for example, be stringent conditions, where stringent conditions can include: 400 mM NaCl, 40 mM PIPES pH 6.4, 1 mM EDTA, 50° C. or 70° C. for 12-16 hours followed by washing (see, e.g., “Molecular Cloning: A Laboratory Manual, Sambrook, et al. (1989) Cold Spring Harbor Laboratory Press). Other conditions, such as physiologically relevant conditions as can be encountered inside an organism, can apply. The skilled person will be able to determine the set of conditions most appropriate for a test of complementarity of two sequences in accordance with the ultimate application of the nucleotides.

[0086] Complementary sequences include those nucleotide sequences of an antisense polynucleotide agent of the invention that base-pair to a second nucleotide sequence over the entire length of one or both nucleotide sequences. Such sequences can be referred to as “fully complementary” with respect to each other herein. However, where a first sequence is referred to as “substantially complementary” with respect to a second sequence herein, the two sequences can be fully complementary, or they can form one or more, but generally not more than 5, 4, 3 or 2 mismatched base pairs upon hybridization for a duplex up to 30 base pairs, while retaining the ability to hybridize under the conditions most relevant to their ultimate application, e.g., antisense inhibition of target gene expression.

[0087] “Complementary” sequences, as used herein, can also include, or be formed entirely from, non-Watson-Crick base pairs and/or base pairs formed from non-natural and modified nucleotides, in so far as the above requirements with respect to their ability to hybridize are fulfilled. Such non-Watson-Crick base pairs include, but are not limited to, G:U Wobble or Hoogstein base pairing.

[0088] As used herein, the term “strand comprising a sequence” refers to an oligonucleotide comprising a chain of nucleotides that is described by the sequence referred to using the standard nucleotide nomenclature.

[0089] “G,” “C,” “A,” “T” and “U” each generally stand for a nucleotide that contains guanine, cytosine, adenine, thymidine and uracil as a base, respectively. However, it will be understood that the terms “deoxyribonucleotide”, “ribonucleotide” and “nucleotide” can also refer to a modified nucleotide, as further detailed below, or a surrogate replacement moiety (see, e.g., Table 2). The skilled person is well aware that guanine, cytosine, adenine, and uracil can be replaced by other moieties without substantially altering the base pairing properties of an oligonucleotide comprising a nucleotide bearing such replacement moiety. For example, without limitation, a nucleotide comprising inosine as its base can base pair with nucleotides containing adenine, cytosine, or uracil. Hence, nucleotides containing uracil, guanine, or adenine can be replaced in the nucleotide sequences of the agents featured in the invention by a nucleotide containing, for example, inosine. In another example, adenine and cytosine anywhere in the oligonucleotide can be replaced with guanine and uracil, respectively to form G-U Wobble base pairing with the target mRNA. Sequences containing such replacement moieties are suitable for the compositions and methods featured in the invention.

[0090] A “nucleoside” is a base-sugar combination. The “nucleobase” (also known as “base”) portion of the nucleoside is normally a heterocyclic base moiety. “Nucleotides” are nucleosides that further include a phosphate group covalently linked to the sugar portion of the nucleoside. For those nucleosides that include a pentofuranosyl sugar, the phosphate group can be linked to the 2′, 3′ or 5′ hydroxyl moiety of the sugar. “Polynucleotides,” also referred to as “oligonucleotides,” are formed through the covalent linkage of adjacent nucleosides to one another, to form a linear polymeric oligonucleotide. Within the polynucleotide structure, the phosphate groups are commonly referred to as forming the internucleoside linkages of the polynucleotide.

[0091] In general, the majority of nucleotides of the antisense polynucleotide agents are ribonucleotides, but as described in detail herein, the agents may also include one or more non-ribonucleotides, e.g., a deoxyribonucleotide. In addition, as used in this specification, an “antisense polynucleotide agent” may include nucleotides (e.g., ribonucleotides or deoxyribonucleotides) with chemical modifications; an antisense polynucleotide agent may include substantial modifications at multiple nucleotides.

[0092] As used herein, the term “modified nucleotide” refers to a nucleotide having, independently, a modified sugar moiety, a modified internucleotide linkage, and/or modified nucleobase. Thus, the term modified nucleotide encompasses substitutions, additions or removal of, e.g., a functional group or atom, to internucleoside linkages, sugar moieties, or nucleobases. The modifications suitable for use in the antisense polynucleiotde agents of the invention include all types of modifications disclosed herein or known in the art. Any such modifications, as used in nucleotides, are encompassed by “antisense polynucleotide agent” for the purposes of this specification and claims.

[0093] As used herein, a “subject” is an animal, such as a mammal, including a primate (such as a human, a non-human primate, e.g., a monkey, and a chimpanzee), a non-primate (such as a cow, a pig, a camel, a llama, a horse, a goat, a rabbit, a sheep, a hamster, a guinea pig, a cat, a dog, a rat, a mouse, a horse, and a whale), or a bird (e.g., a duck or a goose). In an embodiment, the subject is a human, such as a human being treated or assessed for a disease, disorder or condition that would benefit from reduction in AGT expression; a human at risk for a disease, disorder or condition that would benefit from reduction in AGT expression; a human having a disease, disorder or condition that would benefit from reduction in AGT expression; and/or human being treated for a disease, disorder or condition that would benefit from reduction in AGT expression as described herein.

[0094] As used herein, the terms “treating” or “treatment” refer to a beneficial or desired result including, but not limited to, alleviation or amelioration of one or more symptoms associated with unwanted AGT expression, e.g., angiotensin II type 1 receptor activation (AT₁R) (e.g., hypertension, chronic kidney disease, stroke, myocardial infarction, heart failure, aneurysms, peripheral artery disease, heart disease, increased oxidative stress, e.g., increased superoxide formation, inflammation, vasoconstriction, sodium and water retention, potassium and magnesium loss, renin suppression, myocyte and smooth muscle hypertrophy, increased collagen sysnthesis, stimulation of vascular, myocardial and renal fibrosis, increased rate and force of cardiac contractions, altered heart rate, e.g., increased arrhythmia, stimulation of plasminogen activator inhibitor 1 (PAI1), activation of the sympathetic nervous system, and increased endothelin secretion), symptoms of pregnancy-associated hypertension (e.g., preeclampsia, and eclampsia) including, but not limited to intrauterine growth restriction (IUGR) or fetal growth restriction, symptoms associated with malignant hypertension, symptoms associated with hyperaldosteronism; diminishing the extent of unwanted AT₁R activation; stabilization (i.e., not worsening) of the state of chronic AT₁R activation; amelioration or palliation of unwanted AT₁R activation (e.g., hypertension, chronic kidney disease, stroke, myocardial infarction, heart failure, aneurysms, peripheral artery disease, heart disease, increased oxidative stress, e.g., increased superoxide formation, inflammation, vasoconstriction, sodium and water retention, potassium and magnesium loss, renin suppression, myocyte and smooth muscle hypertrophy, increased collagen synthesis, stimulation of vascular, myocardial and renal fibrosis, increased rate and force of cardiac contractions, altered heart rate, e.g., increased arrhythmia, stimulation of plasminogen activator inhibitor 1 (PAI1), activation of the sympathetic nervous system, and increased endothelin secretion) whether detectable or undetectable. “Treatment” can also mean prolonging survival as compared to expected survival in the absence of treatment.

[0095] The term “lower” in the context of the level of AGT in a subject or a disease marker or symptom refers to a statistically significant decrease in such level. The decrease can be, for example, at least 10%, at least 15%, at least 20%, at least 25%, at least 30%, at least 35%, at least 40%, at least 45%, at least 50%, at least 55%, at least 60%, at least 65%, at least 70%, at least 75%, at least 80%, at least 85%, at least 90%, at least 95%, or more. In certain embodiments, a decrease is at least 20%. “Lower” in the context of the level of AGT in a subject is preferably down to a level accepted as within the range of normal for an individual without such disorder.

[0096] As used herein, “prevention” or “preventing,” when used in reference to a disease, disorder or condition thereof, that would benefit from a reduction in expression of an AGT gene, refers to a reduction in the likelihood that a subject will develop a symptom associated with such a disease, disorder, or condition, e.g., a symptom associated with a disease or disorder that is caused by, or associated with renin-angiotensin-aldosterone system (RAAS) activation, such as hypertension. The likelihood of developing hypertension is reduced, for example, when an individual having one or more risk factors for hypertension either fails to develop hypertension or develops a hypertension with less severity relative to a population having the same risk factors and not receiving treatment as described herein. The failure to develop a disease, disorder or condition, or the reduction in the development of a symptom associated with such a disease, disorder or condition (e.g., by at least about 10% on a clinically accepted scale for that disease or disorder), or the exhibition of delayed symptoms delayed (e.g., by days, weeks, months or years) is considered effective prevention.

[0097] As used herein, the term “angiotensinogen-associated disease” or “AGT-associated disease,” is a disease or disorder that is caused by, or associated with renin-angiotensin-aldosterone system (RAAS) activation or whose symptoms or progression respond to RAAS inactivation. The term “angiotensinogen-associated disease” includes a disease, disorder or condition that would benefit from reduction in AGT expression. Such diseases are typically associated with high blood pressure. Non-limiting examples of angiotensinogen-associated diseases include hypertension, e.g., borderline hypertension (also known as prehypertension), primary hypertension (also known as essential hypertension or idiopathic hypertension), secondary hypertension (also known as inessential hypertension), hypertensive emergency (also known as malignant hypertension), hypertensive urgency, isolated systolic or diastolic hypertension, pregnancy-associated hypertension (e.g., preeclampsia, eclampsia, and postpartum preeclampsia), diabetic hypertension, resistant hypertension, refractory hypertension, paroxysmal hypertension, renovascular hypertension (also known as renal hypertension), Goldblatt hypertension, ocular hypertension, glaucoma, pulmonary hypertension, portal hypertension, systemic venous hypertension, systolic hypertension, labile hypertension; hypertensive heart disease, hypertensive nephropathy, atherosclerosis, arteriosclerosis, vasculopathy (including peripheral vascular disease), diabetic nephropathy, diabetic retinopathy, chronic heart failure, cardiomyopathy, diabetic cardiac myopathy, glomerulosclerosis, coarctation of the aorta, aortic aneurism, ventricular fibrosis, Cushing’s syndrome, and other glucocorticoid excess states including chronic steroid therapy, pheochromocytoma, reninoma, secondary aldosteronism and other mineralocorticoid excess states, sleep apnea, thyroid/parathyroid disease, heart failure (e.g., left ventricular systolic dysfunction), myocardial infarction, angina, stroke, diabetes mellitus (e.g., diabetic nephropathy), renal disease e.g., chronic kidney disease or diabetic nephropathy optionally in the context of pregnancy, renal failure, e.g., chronic renal failure, cognitive dysfunction (such as Alzheimer’s), and systemic sclerosis (e.g., scleroderma renal crisis). In certain embodiments, AGT- associated disease includes intrauterine growth restriction (IUGR) or fetal growth restriction.

[0098] Based on the average of seated blood pressure readings that are properly measured during two or more office visits, a subject having a normal blood pressure is one having a systolic pressure of about 90-119 mmHg (about 12-15.9 kPa (kN/m²)) and a diastolic pressure of about 60-79 mmHg (about 8.0-10.5 kPa (kN/m²)); a subject having prehypertension is one having a systolic pressure of about 120-139 mmHg (about 16.1-18.5 kPa (kN/m²)) and a diastolic pressure of about 60-79 mmHg (about 8.0-10.5 kPa (kN/m²)); a subject having hypertension (e.g., Stage I hypertension) is one having a systolic pressure of about 140-159 mmHg (about 18.7-21.2 kPa (kN/m²)) and a diastolic pressure of about 90-99 mmHg (about 12.0-13.2 kPa (kN/m²)); and a subject having hypertension (e.g., Stage II hypertension) is one having a systolic pressure of about ≥160 mmHg (about ≥21.3 kPa (kN/m²)) and a diastolic pressure of about ≥100 mmHg (about ≥13.3 kPa (kN/m²)). Subjects with blood pressures over 130/80 mmHg along with type 1 or type 2 diabetes, or kidney disease are considered as having hypertension.

[0099] In certain embodiments, an angiotensinogen-associated disease is primary hypertension. “Primary hypertension” is a result of environmental or genetic causes (e.g., a result of no obvious underlying medical cause).

[0100] In certain embodiments, an angiotensinogen-associated disease is secondary hypertension. “Secondary hypertension” has an identifiable underlying disorder which can be of multiple etiologies, including renal, vascular, and endocrine causes, e.g., renal parenchymal disease (e.g., polycystic kidneys, glomerular or interstitial disease), renal vascular disease (e.g., renal artery stenosis, fibromuscular dysplasia), endocrine disorders (e.g., adrenocorticosteroid or mineralocorticoid excess, pheochromocytoma, hyperthyroidism or hypothyroidism, growth hormone excess, hyperparathyroidism), coarctation of the aorta, or oral contraceptive use.

[0101] In certain embodiments, an angiotensinogen-associated disease is a hypertensive emergency, e.g., malignant hypertension and accelerated hypertension. “Accelerated hypertension” is severely elevated blood pressure (i.e., equal to or greater than a systolic 180 mmHg or diastolic of 110 mmHg) with direct damage to one or more end organs. Blood pressure must be reduced immediately to prevent further organ damage. “Malignant hypertension” is severely elevated blood pressure (i.e., equal to or greater than a systolic 180 mmHg or diastolic of 110 mmHg) with direct damage to one or more end organs and papilledema. Blood pressure must be reduced immediately to prevent further organ damage. Neurologic end-organ damage due to uncontrolled blood pressure may include hypertensive encephalopathy, cerebral vascular accident/cerebral infarction; subarachnoid hemorrhage, and/or intracranial hemorrhage. Cardiovascular end-organ damage may include myocardial ischemia/infarction, acute left ventricular dysfunction, acute pulmonary edema, and/or aortic dissection. Other organ systems may also be affected by uncontrolled hypertension, which may lead to acute renal failure/insufficiency, retinopathy, eclampsia, or microangiopathic hemolytic anemia.

[0102] In certain embodiments, an angiotensinogen-associated disease is hypertensive urgency. “Hypertensive urgency” is severely elevated blood pressure (i.e., equal to or greater than a systolic 180 mmHg or diastolic of 110 mmHg) with no direct damage to one or more organs. Blood pressure can be brought down safely within a few hours.

[0103] In certain embodiments, an angiotensinogen-associated disease is pregnancy-associated hypertension, e.g., chronic hypertension of pregnancy, gestational hypertension, preeclampsia, eclampsia, preeclampsia superimposed on chronic hypertension, HELLP syndrome, and gestational hypertension (also known as transient hypertension of pregnancy, chronic hypertension identified in the latter half of pregnancy, and pregnancy-induced hypertension (PIH)). A subject having “chronic hypertension of pregnancy” is one having a blood pressure exceeding 140/90 mm Hg before pregnancy or before 20 weeks’ gestation. “Gestational hypertension” or “pregnancy-induced hypertension” refers to hypertension with onset in the latter part of pregnancy (>20 weeks’ gestation) without any other features of preeclampsia, and followed by normalization of the blood pressure postpartum. “Mild preeclampsia” is defined as the presence of hypertension (blood pressure ≥140/90 mm Hg) on two occasions, at least six hours apart, but without evidence of end-organ damage, in a woman who was normotensive before 20 weeks’ gestation. In a subject with preexisting essential hypertension, preeclampsia is diagnosed if systolic blood pressure has increased by 30 mm Hg or if diastolic blood pressure has increased by 15 mm Hg. “Severe preeclampsia” is defined as the presence of 1 of the following symptoms or signs in the presence of preeclampsia; asystolic blood pressure of 160 mm Hg or higher or diastolic blood pressure of 110 mm Hg or higher on two occasions at least six hours apart; proteinuria of more than 5 g in a 24-hour collection or more than 3+ on two random urine samples collected at least four hours apart, pulmonary edema or cyanosis, oliguria (< 400 mL in 24 hours), persistent headaches, epigastric pain and/or impaired liver function, thrombocytopenia, oligohydramnios, decreased fetal growth, or placental abruption. “Eclampsia” is defined as seizures that cannot be attributable to other causes in a woman with preeclampsia. “HELLP syndrome” (also known as edema-proteinuria-hypertension gestosis type B) is Hemolysis, Elevated Liver enzyme levels, and Low Platelet levels in a pregnant subject.

[0104] In certain embodiments, an angiotensinogen-associated disease is resistant hypertension. “Resistant hypertension” is blood pressure that remains above goal (e.g., 140/90 mmHg) in spite of concurrent use of three antihypertensive agents of different classes, one of which is a thiazide diuretic. Subjects whose blood pressure is controlled with four or more medications are also considered to have resistant hypertension.

### II. Antisense Polynucleotide Agents of the Invention

[0105] The present invention provides antisense polynucleotide agents, and compositions comprising such agents, which target an AGT gene and inhibit the expression of the AGT gene. In one embodiment, the antisense polynucleotide agents inhibit the expression of an AGT gene in a cell, such as a cell within a subject, e.g., a mammal, such as a human having an AGT-associated disease, e.g., hypertension.

[0106] The antisense polynucleotide agents of the invention include a region of complementarity which is complementary to at least a part of an mRNA formed in the expression of an AGT gene. The region of complementarity may be about 50 nucleotides or less in length (e.g., about 50, 49, 48, 47, 46, 45, 44, 43, 42, 41, 40, 39, 38, 37, 36, 35, 34, 33, 32, 31, 30, 29, 28, 27, 26, 25, 24, 23, 22, 21, 20, 19, 18, 17, 16, 15, 14, 13, 12, 11, 10, 9, 8, 7, 6, 5, or 4 nucleotides or less in length). Upon contact with a cell expressing the AGT gene, the antisense polynucleotide agent inhibits the expression of the AGT gene (e.g., a human, a primate, a non-primate, or a bird AGT gene) by at least about 10% as assayed by, for example, a PCR or branched DNA (bDNA)-based method, or by a protein-based method, such as by immunofluorescence analysis, using, for example, western Blotting or flow cytometric techniques.

[0107] The region of complementarity between an antisense polynucleotide agent and a target sequence may be substantially complementary (e.g., there is a sufficient degree of complementarity between the antisense polynucleotide agent and a target nucleic acid to so that they specifically hybridize and induce a desired effect), but is generally fully complementary to the target sequence. The target sequence can be derived from the sequence of an mRNA formed during the expression of a AGT gene.

[0108] Accordingly, in one aspect, an antisense polynucleotide agent of the invention specifically hybridizes to a target nucleic acid molecule, such as the mRNA encoding AGT, and comprises a contiguous nucleotide sequence which corresponds to the reverse complement of a nucleotide sequence of any one of SEQ ID NOs:1-4, or a fragment of any one of SEQ ID NOs:1-4.

[0109] In some embodiments, the antisense polynucleotide agents of the invention may be substantially complementary to the target sequence. For example, an antisense polynucleotide agent that is substantially complementary to the target sequence may include a contiguous nucleotide sequence comprising no more than 5 mismatches (e.g., no more than 1, no more than 2, no more than 3, no more than 4, or no more than 5 mismatches) when hybridizing to a target sequence, such as to the corresponding region of a nucleic acid which encodes a mammalian AGT mRNA. In some embodiments, the contiguous nucleotide sequence comprises no more than a single mismatch when hybridizing to the target sequence, such as the corresponding region of a nucleic acid which encodes a mammalian AGT mRNA.

[0110] In some embodiments, the antisense polynucleotide agents of the invention that are substantially complementary to the target sequence comprise a contiguous nucleotide sequence which is at least about 80% complementary over its entire length to the equivalent region of the nucleotide sequence of any one of SEQ ID NOs:1-4, or a fragment of any one of SEQ ID NOs:1-4, such as about 85%, about 86%, about 87%, about 88%, about 89%, about 90%, about % 91%, about 92%, about 93%, about 94%, about 95%, about 96%, about 97%, about 98%, or about 99% complementary.

[0111] In some embodiments, an antisense polynucleotide agent comprises a contiguous nucleotide sequence which is fully complementary over its entire length to the equivalent region of the nucleotide sequence of any one of SEQ ID NOs:1-4 (or a fragment of any one of SEQ ID NOs:1-4). For example, the nucleotide sequence of the antisense polynucleotide agent (ASO), A-134986.1, is fully complementary over its entire length to the equivalent region of nucleotides 275-294 of NM_000029.3 (SEQ ID NO:1) (see, e.g., Table 3). Similarly, the nucleotide sequence of the antisense polynucleotide agent (ASO), A-135032.1, is fully complementary over its entire length to the equivalent region of nucleotides 981-1000 of NM_000029.3 (SEQ ID NO:1) (see, e.g., Table 3) and the nucleotide sequence of the antisense polynucleotide agent (ASO), A-135034.1, is fully complementary over its entire length to the equivalent region of nucleotides 1003-1022 of NM_000029.3 (SEQ ID NO:1) (see, e.g., Table 3).

[0112] An antisense polynucleotide agent may comprise a contiguous nucleotide sequence of about 4 to about 50 nucleotides in length, e.g., 8-49, 8-48, 8-47, 8-46, 8-45, 8-44, 8-43, 8-42, 8-41, 8-40, 8-39, 8-38, 8-37, 8-36, 8-35, 8-34, 8-33, 8-32, 8-31, 8-30, 8-29, 8-28, 8-27, 8-26, 8-25, 8-24, 8-23, 8-22, 8-21, 8-20, 8-19, 8-18, 8-17, 8-16, 8-15, 8-14, 8-13, 8-12, 8-11, 8-10, 8-9, 10-49, 10-48, 10-47, 10-46, 10-45, 10-44, 10-43, 10-42, 10-41, 10-40, 10-39, 10-38, 10-37, 10-36, 10-35, 10-34, 10-33, 10-32, 10-31, 10-30, 10-29, 10-28, 10-27, 10-26, 10-25, 10-24, 10-23, 10-22, 10-21, 10-20, 10-19, 10-18, 10-17, 10-16, 10-15, 10-14, 10-13, 10-12, 10-11,11-49, 11-48, 11-47, 11-46, 11-45, 11-44, 11-43, 11-42, 11-41, 11-40, 11-39, 11-38, 11-37, 11-36, 11-35, 11-34, 11-33, 11-32, 11-31, 11-30, 11-29, 11-28, 11-27, 11-26, 11-25, 11-24, 11-23, 11-22, 11-21, 11-20, 11-19, 11-18, 11-17, 11-16, 11-15, 11-14, 11-13, 11-12, 12-49, 12-48, 12-47, 12-46, 12-45, 12-44, 12-43, 12-42, 12-41, 12-40, 12-39, 12-38, 12-37, 12-36, 12-35, 12-34, 12-33, 12-32, 12-31, 12-30, 12-29, 12-28, 12-27, 12-26, 12-25, 12-24, 12-23, 12-22, 12-21, 12-20, 12-19, 12-18, 12-17, 12-16, 12-15, 12-14, 12-13, 13-49, 13-48, 13-47, 13-46, 13-45, 13-44, 13-43, 13-42, 13-41, 13-40, 13-39, 13-38, 13-37, 13-36, 13-35, 13-34, 13-33, 13-32, 13-31, 13-30, 13-29, 13-28, 13-27, 13-26, 13-25, 13-24, 13-23, 13-22, 13-21, 13-20, 13-19, 13-18, 13-17, 13-16, 13-15, 13-14, 14-49, 14-48, 14-47, 14-46, 14-45, 14-44, 14-43, 14-42, 14-41, 14-40, 14-39, 14-38, 14-37, 14-36, 14-35, 14-34, 14-33, 14-32, 14-31, 14-30, 14-29, 14-28, 14-27, 14-26, 14-25, 14-24, 14-23, 14-22, 14-21, 14-20, 14-19, 14-18, 14-17, 14-16, 14-15, 15-49, 15-48, 15-47, 15-46, 15-45, 15-44, 15-43, 15-42, 15-41, 15-40, 15-39, 15-38, 15-37, 15-36, 15-35, 15-34, 15-33, 15-32, 15-31, 15-30, 15-29, 15-28, 15-27, 15-26, 15-25, 15-24, 15-23, 15-22, 15-21, 15-20, 15-19, 15-18, 15-17, 15-16,16-49, 16-48, 16-47, 16-46, 16-45, 16-44, 16-43, 16-42, 16-41, 16-40, 16-39, 16-38, 16-37, 16-36, 16-35, 16-34, 16-33, 16-32, 16-31, 16-30, 16-29, 16-28, 16-27, 16-26, 16-25, 16-24, 16-23, 16-22, 16-21, 16-20, 16-19, 16-18, 16-17, 17-49, 17-48, 17-47, 17-46, 17-45, 17-44, 17-43, 17-42, 17-41, 17-40, 17-39, 17-38, 17-37, 17-36, 17-35, 17-34, 17-33, 17-32, 17-31, 17-30, 17-29, 17-28, 17-27, 17-26, 17-25, 17-24, 17-23, 17-22, 17-21, 17-20, 17-19, 17-18, 18-49, 18-48, 18-47, 18-46, 18-45, 18-44, 18-43, 18-42, 18-41, 18-40, 18-39, 18-38, 18-37, 18-36, 18-35, 18-34, 18-33, 18-32, 18-31, 18-30, 18-29, 18-28, 18-27, 18-26, 18-25, 18-24, 18-23, 18-22, 18-21, 18-20, 19-49, 19-48, 19-47, 19-46, 19-45, 19-44, 19-43, 19-42, 19-41, 19-40, 19-39, 19-38, 19-37, 19-36, 19-35, 19-34, 19-33, 19-32, 19-31, 19-30, 19-29, 19-28, 19-27, 19-26, 19-25, 19-24, 19-23, 19-22, 19-21, 19-20, 20-49, 20-48, 20-47, 20-46, 20-45, 20-44, 20-43, 20-42, 20-41, 20-40, 20-39, 20-38, 20-37, 20-36, 20-35, 20-34, 20-33, 20-32, 20-31, 20-30, 20-29, 20-28, 20-27, 20-26, 20-25, 20-24,20-23, 20-22, 20-21, 21-49, 21-48, 21-47, 21-46, 21-45, 21-44, 21-43, 21-42, 21-41, 21-40, 21-39, 21-38, 21-37, 21-36, 21-35, 21-34, 21-33, 21-32, 21-31, 21-30, 21-29, 21-28, 21-27, 21-26, 21-25, 21-24, 21-23, 21-22, 22-49, 22-48, 22-47, 22-46, 22-45, 22-44, 22-43, 22-42, 22-41, 22-40, 22-39, 22-38, 22-37, 22-36, 22-35, 22-34, 22-33, 22-32, 22-31, 22-30, 22-29, 22-28, 22-27, 22-26, 22-25, 22-24, 22-23, 23-49, 23-48, 23-47, 23-46, 23-45, 23-44, 23-43, 23-42, 23-41, 23-40, 23-39, 23-38, 23-37, 23-36, 23-35, 23-34, 23-33, 23-32, 23-31, 23-30, 23-29, 23-28, 23-27, 23-26, 23-25, 23-24, 24-49, 24-48, 24-47, 24-46, 24-45, 24-44, 24-43, 24-42, 24-41, 24-40, 24-39, 24-38, 24-37, 24-36, 24-35, 24-34, 24-33, 24-32, 24-31, 24-30, 24-29, 24-28, 24-27, 24-26, 24-25, 25-49, 25-48, 25-47, 25-46, 25-45, 25-44, 25-43, 25-42, 25-41, 25-40, 25-39, 25-38, 25-37, 25-36, 25-35, 25-34, 25-33, 25-32, 25-31, 25-30, 25-29, 25-28, 25-27, 25-26,26-49, 26-48, 26-47, 26-46, 26-45, 26-44, 26-43, 26-42, 26-41, 26-40, 26-39, 26-38, 26-37, 26-36, 26-35, 26-34, 26-33, 26-32, 26-31, 26-30, 26-29, 26-28, 26-27, 27-49, 27-48, 27-47, 27-46, 27-45, 27-44, 27-43, 27-42, 27-41, 27-40, 27-39, 27-38, 27-37, 27-36, 27-35, 27-34, 27-33, 27-32, 27-31, 27-30, 27-29, 27-28, 28-49, 28-48, 28-47, 28-46, 28-45, 28-44, 28-43, 28-42, 28-41, 28-40, 28-39, 28-38, 28-37, 28-36, 28-35, 28-34, 28-33, 28-32, 28-31, 28-30, 28-29, 29-49, 29-48, 29-47, 29-46, 29-45, 29-44, 29-43, 29-42, 29-41, 29-40, 29-39, 29-38, 29-37, 29-36, 29-35, 29-34, 29-33, 29-32, 29-31, 29-30, 30-49, 30-48, 30-47, 30-46, 30-45, 30-44, 30-43, 30-42, 30-41, 30-40, 30-39, 30-38, 30-37, 30-36, 30-35, 30-34, 30-33, 30-32, or 30-31 nucleotides in length, e.g., 4, 5, 6, 7, 8, 9, 10, 11, 12, 13, 14, 15, 16, 17, 18, 19, 20, 21, 22, 23, 24, 25, 26, 27, 28, 29, 30, 31, 32, 33, 34, 35, 36, 37, 38, 39, 40, 41, 42, 43, 44, 45, 46, 47, 48, 49, or 50 nucleotides in length.

[0113] In some embodiments, an antisense polynucleotide agent may comprise a contiguous nucleotide sequence of no more than 22 nucleotides, such as no more than 21 nucleotides, 20 nucleotides, 19 nucleotides, or no more than 18 nucleotides. In some embodiments the antisense polynucleotide agenst of the invention comprises less than 20 nucleotides. In other emabodiments, the antisense polynucleotide agents of the invention comprise 20 nucleotides.

[0114] In certain aspects, an antisense polynucleotide agent of the invention includes a sequence selected from the group of sequences provided in Table 3. It will be understood that, although some of the sequences in Table 3 are described as modified and/or conjugated sequences, an antisense polynucleotide agent of the invention, may also comprise any one of the sequences set forth in Table 3 that is un-modified, un-conjugated, and/or modified and/or conjugated differently than described therein.

[0115] By virtue of the nature of the nucleotide sequences provided in Table 3, antisense polynucleotide agents of the invention may include one of the sequences of Table 3 minus only a few nucleotides on one or both ends and yet remain similarly effective as compared to the antisense polynucleotide agents described above. Hence, antisense polynucleotide agents having a sequence of at least 4, 5, 6, 7, 8, 9, 10, 11, 12, 13, 14,15, 16, 17, 18, 19, 20, or more contiguous nucleotides derived from one of the sequences of Table 3 and differing in their ability to inhibit the expression of an AGT gene by not more than about 5, 10, 15, 20, 25, or 30% inhibition from an antisense polynucleotide agent comprising the full sequence, are contemplated to be within the scope of the present invention.

[0116] In addition, the antisense polynucleotide agents provided in Table 3 identify a region(s) in an AGT transcript that is susceptible to antisense inhibition (e.g., the regions encompassed by the start and end positions relative to NM_000029.3 in Table 3). As such, the present invention further features antisense polynucleotide agents that target within one of these sites. As used herein, an antisense polynucleotide agent is said to target within a particular site of an RNA transcript if the antisense polynucleotide agent promotes antisense inhibition of the target at that site. Such an antisense polynucleotide agent will generally include at least about 15 contiguous nucleotides from one of the sequences provided in Table 3 coupled to additional nucleotide sequences taken from the region contiguous to the selected sequence in an AGT gene.

[0117] While a target sequence is generally about 4-50 nucleotides in length, there is wide variation in the suitability of particular sequences in this range for directing antisense inhibition of any given target RNA. Various software packages and the guidelines set out herein provide guidance for the identification of optimal target sequences for any given gene target, but an empirical approach can also be taken in which a “window” or “mask” of a given size (as a non-limiting example, 20 nucleotides) is literally or figuratively (including, e.g., in silico) placed on the target RNA sequence to identify sequences in the size range that can serve as target sequences. By moving the sequence “window” progressively one nucleotide upstream or downstream of an initial target sequence location, the next potential target sequence can be identified, until the complete set of possible sequences is identified for any given target size selected. This process, coupled with systematic synthesis and testing of the identified sequences (using assays as described herein or as known in the art) to identify those sequences that perform optimally can identify those RNA sequences that, when targeted with an antisense polynucleotide agent, mediate the best inhibition of target gene expression. Thus, while the sequences identified, for example, in Table 3 represent effective target sequences, it is contemplated that further optimization of antisense inhibition efficiency can be achieved by progressively “walking the window” one nucleotide upstream or downstream of the given sequences to identify sequences with equal or better inhibition characteristics.

[0118] Further, it is contemplated that for any sequence identified, e.g., in Table 3, further optimization could be achieved by systematically either adding or removing nucleotides to generate longer or shorter sequences and testing those sequences generated by walking a window of the longer or shorter size up or down the target RNA from that point. Again, coupling this approach to generating new candidate targets with testing for effectiveness of antisense polynucleotide agents based on those target sequences in an inhibition assay as known in the art and/or as described herein can lead to further improvements in the efficiency of inhibition. Further still, such optimized sequences can be adjusted by, e.g., the introduction of modified nucleotides as described herein or as known in the art, addition or changes in length, or other modifications as known in the art and/or discussed herein to further optimize the molecule (e.g., increasing serum stability or circulating half-life, increasing thermal stability, enhancing transmembrane delivery, targeting to a particular location or cell type, increasing interaction with silencing pathway enzymes, increasing release from endosomes) as an expression inhibitor.

### III. Modified Antisense Polynucleotide Agents of the Invention

[0119] In one embodiment, the nucleotides of an antisense polynucleotide agent of the invention are un-modified, and do not comprise, e.g., chemical modifications and/or conjugations known in the art and described herein. In another embodiment, at least one of the nucleotides of an antisense polynucleotide agent of the invention is chemically modified to enhance stability or other beneficial characteristics. In certain embodiments of the invention, substantially all of the nucleotides of an antisense polynucleotide agent of the invention are modified. In other embodiments of the invention, all of the nucleotides of an antisense polynucleotide agent of the invention are modified. Antisense polynucleotide agents of the invention in which “substantially all of the nucleotides are modified” are largely but not wholly modified and can include not more than 5, 4, 3, 2, or 1 unmodified nucleotides.

[0120] The nucleic acids featured in the invention can be synthesized and/or modified by standard methods known in the art as further discussed below, e.g., solution-phase or solid-phase organic synthesis or both, e.g., by use of an automated DNA synthesizer, such as are commercially available from, for example, Biosearch, Applied Biosystems®, Inc. Well-established methods for the synthesis and/or modification of the nucleic acids featured in the invention are described in, for example, “Current protocols in nucleic acid chemistry,” Beaucage, S.L. et al. (Edrs.), John Wiley & Sons, Inc., New York, NY, USA, which is hereby incorporated herein by reference. Modifications include, for example, end modifications, e.g., 5′-end modifications (phosphorylation, conjugation, inverted linkages) or 3′-end modifications (conjugation, DNA nucleotides, inverted linkages, etc.); base modifications, e.g., replacement with stabilizing bases, destabilizing bases, or bases that base pair with an expanded repertoire of partners, removal of bases (abasic nucleotides), or conjugated bases; sugar modifications (e.g., at the 2′-position or 4′-position) or replacement of the sugar; and/or backbone modifications, including modification or replacement of the phosphodiester linkages.

[0121] Specific examples of modified nucleotides useful in the embodiments described herein include, but are not limited to nucleotides containing modified backbones or no natural internucleoside linkages. Nucleotides having modified backbones include, among others, those that do not have a phosphorus atom in the backbone. For the purposes of this specification, and as sometimes referenced in the art, modified nucleotides that do not have a phosphorus atom in their internucleoside backbone can also be considered to be oligonucleosides. In some embodiments, a modified antisense polynucleotide agent will have a phosphorus atom in its internucleoside backbone.

[0122] Modified nucleotide backbones include, for example, phosphorothioates, chiral phosphorothioates, phosphorodithioates, phosphotriesters, aminoalkylphosphotriesters, methyl and other alkyl phosphonates including 3′-alkylene phosphonates and chiral phosphonates, phosphinates, phosphoramidates including 3′-amino phosphoramidate and aminoalkylphosphoramidates, thionophosphoramidates, thionoalkylphosphonates, thionoalkylphosphotriesters, and boranophosphates having normal 3′-5′ linkages, 2′-5′-linked analogs of these, and those having inverted polarity wherein the adjacent pairs of nucleoside units are linked 3′-5′ to 5′-3′ or 2′-5′ to 5′-2′. Various salts, mixed salts and free acid forms are also included.

[0123] Representative U.S. patents that teach the preparation of the above phosphorus-containing linkages include, but are not limited to, U.S. Pat. Nos. 3,687,808; 4,469,863; 4,476,301; 5,023,243; 5,177,195; 5,188,897; 5,264,423; 5,276,019; 5,278,302; 5,286,717; 5,321,131; 5,399,676; 5,405,939; 5,453,496; 5,455,233; 5,466,677; 5,476,925; 5,519,126; 5,536,821; 5,541,316; 5,550,111; 5,563,253; 5,571,799; 5,587,361; 5,625,050; 6,028,188; 6,124,445; 6,160,109; 6,169,170; 6,172,209; 6,239,265; 6,277,603; 6,326,199; 6,346,614; 6,444,423; 6,531,590; 6,534,639; 6,608,035; 6,683,167; 6,858,715; 6,867,294; 6,878,805; 7,015,315; 7,041,816; 7,273,933; 7,321,029; and U.S. Pat. RE39464, the entire contents of each of which are hereby incorporated herein by reference.

[0124] Modified nucleotide backbones that do not include a phosphorus atom therein have backbones that are formed by short chain alkyl or cycloalkyl internucleoside linkages, mixed heteroatoms and alkyl or cycloalkyl internucleoside linkages, or one or more short chain heteroatomic or heterocyclic internucleoside linkages. These include those having morpholino linkages (formed in part from the sugar portion of a nucleoside); siloxane backbones; sulfide, sulfoxide and sulfone backbones; formacetyl and thioformacetyl backbones; methylene formacetyl and thioformacetyl backbones; alkene containing backbones; sulfamate backbones; methyleneimino and methylenehydrazino backbones; sulfonate and sulfonamide backbones; amide backbones; and others having mixed N, O, S and CH₂ component parts.

[0125] Representative U.S. patents that teach the preparation of the above oligonucleosides include, but are not limited to, U.S. Pat. Nos. 5,034,506; 5,166,315; 5,185,444; 5,214,134; 5,216,141; 5,235,033; 5,64,562; 5,264,564; 5,405,938; 5,434,257; 5,466,677; 5,470,967; 5,489,677; 5,541,307; 5,561,225; 5,596,086; 5,602,240; 5,608,046; 5,610,289; 5,618,704; 5,623,070; 5,663,312; 5,633,360; 5,677,437; and, 5,677,439, the entire contents of each of which are hereby incorporated herein by reference.

[0126] In other embodiments, suitable nucleotide mimetics are contemplated for use in antisense polynucleotide agents, in which both the sugar and the internucleoside linkage, i.e., the backbone, of the nucleotide units are replaced with novel groups. The base units are maintained for hybridization with an appropriate nucleic acid target compound. One such oligomeric compound, an RNA mimetic that has been shown to have excellent hybridization properties, is referred to as a peptide nucleic acid (PNA). In PNA compounds, the sugar backbone of an RNA is replaced with an amide containing backbone, in particular an aminoethylglycine backbone. The nucleobases are retained and are bound directly or indirectly to aza nitrogen atoms of the amide portion of the backbone. Representative U.S. patents that teach the preparation of PNA compounds include, but are not limited to, U.S. Pat. Nos. 5,539,082; 5,714,331; and 5,719,262, the entire contents of each of which are hereby incorporated herein by reference. Additional PNA compounds suitable for use in the antisense polynucleotide agents of the invention are described in, for example, in Nielsen et al., Science, 1991, 254, 1497-1500.

[0127] Some embodiments featured in the invention include polynucleotides with phosphorothioate backbones and oligonucleosides with heteroatom backbones, and in particular —CH₂—NH—CH₂—, —CH₂—N(CH₃)—O—CH₂—[known as a methylene (methylimino) or MMI backbone], —CH₂—O—N(CH₃)—CH₂—, —CH₂—N(CH₃)—N(CH₃)—CH₂— and —N(CH₃)—CH₂—CH₂—[wherein the native phosphodiester backbone is represented as —O—P—O—CH₂—] of the above-referenced U.S. Patent No. 5,489,677, and the amide backbones of the above-referenced U.S. Patent No. 5,602,240. In some embodiments, the antisense polynucleotide agents featured herein have morpholino backbone structures of the above-referenced U.S. Pat. No. 5,034,506.

[0128] Modified nucleotides can also contain one or more modified or substituted sugar moieties. The antisense polynucleotide agents featured herein can include one of the following at the 2′-position: OH; F; O—, S—, or N-alkyl; O—, S—, or N-alkenyl; O—, S— or N-alkynyl; or O-alkyl-O-alkyl, wherein the alkyl, alkenyl and alkynyl can be substituted or unsubstituted C₁ to C₁₀ alkyl or C₂ to C₁₀ alkenyl and alkynyl. Exemplary suitable modifications include O[(CH₂)ₙO] ₘCH₃, O(CH₂).ₙOCH₃, O(CH₂)ₙNH₂, O(CH₂) ₙCH₃, O(CH₂)ₙONH₂, and O(CH₂)ₙON[(CH₂)ₙCH₃)]₂, where n and m are from 1 to about 10.

[0129] In other embodiments, antisense polynucleotide agents include one of the following at the 2′ position: C₁ to C₁₀ lower alkyl, substituted lower alkyl, alkaryl, aralkyl, O-alkaryl or O-aralkyl, SH, SCH₃, OCN, Cl, Br, CN, CF₃, OCF₃, SOCH₃, SO₂CH₃, ONO₂, NO₂, N₃, NH₂, heterocycloalkyl, heterocycloalkaryl, aminoalkylamino, polyalkylamino, substituted silyl, an RNA cleaving group, a reporter group, an intercalator, a group for improving the pharmacokinetic properties of an antisense polynucleotide, or a group for improving the pharmacodynamic properties of an antisense polynucleotide agent, and other substituents having similar properties. In some embodiments, the modification includes a 2′-methoxyethoxy (2′-O--CH₂CH₂OCH₃, also known as 2′-O-(2-methoxyethyl) or 2′-MOE) (Martin et al., Helv. Chim. Acta, 1995, 78:486-504) i.e., an alkoxy-alkoxy group. Another exemplary modification is 2′-dimethylaminooxyethoxy, i.e., a O(CH₂)₂ON(CH₃)₂ group, also known as 2′-DMAOE, as described in examples herein below, and 2′-dimethylaminoethoxyethoxy (also known in the art as 2′-O-dimethylaminoethoxyethyl or 2′-DMAEOE), i.e., 2′—O—CH₂—O—CH₂—N(CH₂)₂.

[0130] Other modifications include 2′-methoxy (2′-O-CH₃) also referred to as 2′-OMe, 2′-aminopropoxy (2′-OCH₂CH₂CH₂NH₂) and 2′-fluoro (2′-F). Similar modifications can also be made at other positions on a nucleotide of an antisense polynucleotide agent, particularly the 3′ position of the sugar on the 3′ terminal nucleotide. Antisense polynucleotide agents can also have sugar mimetics such as cyclobutyl moieties in place of the pentofuranosyl sugar. Representative U.S. patents that teach the preparation of such modified sugar structures include, but are not limited to, U.S. Pat. Nos. 4,981,957; 5,118,800; 5,319,080; 5,359,044; 5,393,878; 5,446,137; 5,466,786; 5,514,785; 5,519,134; 5,567,811; 5,576,427; 5,591,722; 5,597,909; 5,610,300; 5,627,053; 5,639,873; 5,646,265; 5,658,873; 5,670,633; and 5,700,920, certain of which are commonly owned with the instant application. The entire contents of each of the foregoing are hereby incorporated herein by reference.

[0131] Additional nucleotides having modified or substituted sugar moieties for use in the polynucleotide agents of the invention include nucleotides comprising a bicyclic sugar. A “bicyclic sugar” is a furanosyl ring modified by the bridging of two atoms. A “bicyclic nucleoside” (“BNA”) is a nucleoside having a sugar moiety comprising a bridge connecting two carbon atoms of the sugar ring, thereby forming a bicyclic ring system. In certain embodiments, the bridge connects the 4′-carbon and the 2′-carbon of the sugar ring. Thus, in some embodiments an antisense polynucleotide agent may include one or more locked nucleic acids. A “locked nucleic acid” (“LNA”) is a nucleotide having a modified ribose moiety in which the ribose moiety comprises an extra bridge connecting the 2′ and 4′ carbons. In other words, an LNA is a nucleotide comprising a bicyclic sugar moiety comprising a 4′-CH₂-O-2′ bridge. This structure effectively “locks” the ribose in the 3′-endo structural conformation. The addition of locked nucleic acids to santisense polynucleotide agents has been shown to increase santisense polynucleotide agent stability in serum, and to reduce off-target effects (Elmen, J. et al., (2005) Nucleic Acids Research 33(1):439-447; Mook, OR. et al., (2007) Mol Canc Ther 6(3):833-843; Grunweller, A. et al., (2003) Nucleic Acids Research 31(12):3185-3193).

[0132] Examples of bicyclic nucleosides for use in the polynucleotides of the invention include without limitation nucleosides comprising a bridge between the 4′ and the 2′ ribosyl ring atoms. In certain embodiments, the antisense polynucleotide agents of the invention include one or more bicyclic nucleosides comprising a 4′ to 2′ bridge. Examples of such 4′ to 2′ bridged bicyclic nucleosides, include but are not limited to 4′-(CH2)-O-2′ (LNA); 4′-(CH2)-S-2′; 4′-(CH2)2-O-2′ (ENA); 4′-CH(CH3)-O-2′ (also referred to as “constrained ethyl” or “cEt”) and 4′-CH(CH2OCH3)-O-2′ (and analogs thereof; see, e.g., U.S. Pat. No. 7,399,845); 4′-C(CH3)(CH3)-O-2′ (and analogs thereof; see e.g., US Patent No. 8,278,283); 4′-CH2-N(OCH3)-2′ (and analogs thereof; see e.g., U.S. Pat. No. 8,278,425); 4′-CH2-O-N(CH3)-2′ (see, e.g., U.S. Pat. Publication No. 2004/0171570); 4′-CH2-N(R)-O-2′, wherein R is H, C1-C12 alkyl, or a protecting group (see, e.g., U.S. Pat. No. 7,427,672); 4′-CH2-C(H)(CH3)-2′ (see, e.g., Chattopadhyaya et al., J. Org. Chem., 2009, 74, 118-134); and 4′-CH2-C(=CH2)-2′ (and analogs thereof; see, e.g., U.S. Pat. No. 8,278,426). The entire contents of each of the foregoing are hereby incorporated herein by reference.

[0133] Additional representative U.S. Patents and US Patent Publications that teach the preparation of locked nucleic acid nucleotides include, but are not limited to, the following: U.S. Pat. Nos. 6,268,490; 6,525,191; 6,670,461; 6,770,748; 6,794,499; 6,998,484; 7,053,207; 7,034,133;7,084,125; 7,399,845; 7,427,672; 7,569,686; 7,741,457; 8,022,193; 8,030,467; 8,278,425; 8,278,426; 8,278,283; US 2008/0039618; and US 2009/0012281, the entire contents of each of which are hereby incorporated herein by reference.

[0134] Any of the foregoing bicyclic nucleosides can be prepared having one or more stereochemical sugar configurations including for example α-L-ribofuranose and β-D-ribofuranose (see WO 99/14226).

[0135] In one particular embodiment of the invention, an antisense polynucleotide agent can include one or more constrained ethyl nucleotides. As used herein, a “constrained ethyl nucleotide” or “cEt” is a locked nucleic acid comprising a bicyclic sugar moiety comprising a4′-CH(CH₃)-O-2′ bridge. In one embodiment, a constrained ethyl nucleotide is in an S conformation and is referred to as an “S-constrained ethyl nucleotide” or “S-cEt.”

[0136] Modified nucleotides included in the antisense polynucleotide agents of the invention can also contain one or more sugar mimetics. For example, the antisense polynucleotide agent may include a “modified tetrahydropyran nucleotide” or “modified THP nucleotide.” A “modified tetrahydropyran nucleotide” has a six-membered tetrahydropyran “sugar” substituted in for the pentofuranosyl residue in normal nucleotides (a sugar surrogate). Modified THP nucleotides include, but are not limited to, what is referred to in the art as hexitol nucleic acid (HNA), anitol nucleic acid (ANA), manitol nucleic acid (MNA) (see, e.g., Leumann, Bioorg. Med. Chem., 2002, 10, 841-854), or fluoro HNA (F-HNA).

[0137] In some embodiments of the invention, sugar surrogates comprise rings having more than 5 atoms and more than one heteroatom. For example nucleotides comprising morpholino sugar moieties and their use in oligomeric compounds has been reported (see for example: Braasch et al., Biochemistry, 2002, 41, 4503-4510; and U.S. Pat. Nos. 5,698,685; 5,166,315; 5,185,444; and 5,034,506). Morpholinos may be modified, for example by adding or altering various substituent groups from the above morpholino structure. Such sugar surrogates are referred to herein as “modified morpholinos.”

[0138] Combinations of modifications are also provided without limitation, such as 2′-F-5′-methyl substituted nucleosides (see PCT International Application WO 2008/101157 published on Aug. 21, 2008 for other disclosed 5′, 2′-bis substituted nucleosides) and replacement of the ribosyl ring oxygen atom with S and further substitution at the 2′-position (see published U.S. Pat. Application US2005-0130923, published on Jun. 16, 2005) or alternatively 5′-substitution of a bicyclic nucleic acid (see PCT International Application WO 2007/134181, published on 11/22/07 wherein a 4′-CH2-0-2′ bicyclic nucleoside is further substituted at the 5′ position with a 5′-methyl or a 5′-vinyl group). The synthesis and preparation of carbocyclic bicyclic nucleosides along with their oligomerization and biochemical studies have also been described (see, e.g., Srivastava et al., J. Am. Chem. Soc. 2007, 129(26), 8362-8379).

[0139] In certain embodiments, antisense compounds comprise one or more modified cyclohexenyl nucleosides, which is a nucleoside having a six-membered cyclohexenyl in place of the pentofuranosyl residue in naturally occurring nucleosides. Modified cyclohexenyl nucleosides include, but are not limited to those described in the art (see for example commonly owned, published PCT Application WO 2010/036696, published on Apr. 10, 2010, Robeyns et al., J. Am. Chem. Soc., 2008, 130(6), 1979-1984; Horvath et al., Tetrahedron Letters, 2007, 48, 3621-3623; Nauwelaerts et al., J. Am. Chem. Soc., 2007, 129(30), 9340-9348; Gu et al., Nucleosides, Nucleotides & Nucleic Acids, 2005, 24(5-7), 993-998; Nauwelaerts et al., Nucleic Acids Research, 2005, 33(8), 2452-2463; Robeyns et al., Acta Crystallographica, Section F: Structural Biology and Crystallization Communications, 2005, F61(6), 585-586; Gu et al., Tetrahedron, 2004, 60(9), 2111-2123; Gu et al., Oligonucleotides, 2003, 13(6), 479-489; Wang et al., J. Org. Chem., 2003, 68, 4499-4505; Verbeure et al., Nucleic Acids Research, 2001, 29(24), 4941-4947; Wang et al., J. Org. Chem., 2001, 66, 8478-82; Wang et al., Nucleosides, Nucleotides & Nucleic Acids, 2001, 20(4-7), 785-788; Wang et al., J. Am. Chem., 2000, 122, 8595-8602; Published PCT application, WO 06/047842; and Published PCT Application WO 01/049687; the text of each is incorporated by reference herein, in their entirety).

[0140] An antisense polynucleotide agent can also include nucleobase modifications or substitutions. As used herein, “unmodified” or “natural” nucleobases include the purine bases adenine (A) and guanine (G), and the pyrimidine bases thymine (T), cytosine (C) and uracil (U). Modified nucleobases include other synthetic and natural nucleobases such as deoxy-thymine (dT), 5-methylcytosine (5-me-C), 5-hydroxymethyl cytosine, xanthine, hypoxanthine, 2-aminoadenine, 6-methyl and other alkyl derivatives of adenine and guanine, 2-propyl and other alkyl derivatives of adenine and guanine, 2-thiouracil, 2-thiothymine and 2-thiocytosine, 5-halouracil and cytosine, 5-propynyl uracil and cytosine, 6-azo uracil, cytosine and thymine, 5-uracil (pseudouracil), 4-thiouracil, 8-halo, 8-amino, 8-thiol, 8-thioalkyl, 8-hydroxyl anal other 8-substituted adenines and guanines, 5-halo, particularly 5-bromo, 5-trifluoromethyl and other 5-substituted uracils and cytosines, 7-methylguanine and 7-methyladenine, 8-azaguanine and 8-azaadenine, 7-deazaguanine and 7-daazaadenine and 3-deazaguanine and 3-deazaadenine. Further nucleobases include those disclosed in U.S. Pat. No. 3,687,808, those disclosed in “Modified Nucleosides in Biochemistry,” Biotechnology and Medicine, Herdewijn, P. ed. Wiley-VCH, 2008; those disclosed in The Concise Encyclopedia Of Polymer Science And Engineering, pages 858-859, Kroschwitz, J. L, ed. John Wiley & Sons, 1990, these disclosed by Englisch et al., Angewandte Chemie,International Edition, 1991, 30, 613, and those disclosed by Sanghvi, Y S., Chapter 15, antisense polynucleotide agent Research and Applications, pages 289-302, Crooke, S. T. and Lebleu, B., Ed., CRC Press, 1993. Certain of these nucleobases are particularly useful for increasing the binding affinity of the agents featured in the invention. These include 5-substituted pyrimidines, 6-azapyrimidines and N-2, N-6 and 0-6 substituted purines, including 2-aminopropyladenine, 5-propynyluracil and 5-propynylcytosine. 5-methylcytosine substitutions have been shown to increase nucleic acid duplex stability by 0.6-1.2° C. (Sanghvi, Y. S., Crooke, S. T. and Lebleu, B., Eds., antisense polynucleotide agent Research and Applications, CRC Press, Boca Raton, 1993, pp. 276-278) and are exemplary base substitutions, even more particularly when combined with 2′-O-methoxyethyl sugar modifications.

[0141] Representative U.S. patents that teach the preparation of certain of the above noted modified nucleobases as well as other modified nucleobases include, but are not limited to, the above noted U.S. Pat. Nos. 3,687,808, 4,845,205; 5,130,30; 5,134,066; 5,175,273; 5,367,066; 5,432,272; 5,457,187; 5,459,255; 5,484,908; 5,502,177; 5,525,711; 5,552,540; 5,587,469; 5,594,121, 5,596,091; 5,614,617; 5,681,941; 5,750,692; 6,015,886; 6,147,200; 6,166,197; 6,222,025; 6,235,887; 6,380,368; 6,528,640; 6,639,062; 6,617,438; 7,045,610; 7,427,672; and 7,495,088, the entire contents of each of which are hereby incorporated herein by reference.

[0142] One or more of the nucleotides of an antisense polynucleotide agent of the invention may also include a hydroxymethyl substituted nucleotide. A “hydroxymethyl substituted nucleotide” is an acyclic 2′-3′-seco-nucleotide, also referred to as an “unlocked nucleic acid” (“UNA”) modification. Representative U.S. publications that teach the preparation of UNA include, but are not limited to, U.S. Pat. No. 8,314,227; and U.S. Pat. Publication Nos. 2013/0096289; 2013/0011922; and 2011/0313020, the entire contents of each of which are hereby incorporated herein by reference.

[0143] Additional modifications which may potentially stabilize the ends of antisense polynucleotide agents can include N- (acetylaminocaproyl)-4-hydroxyprolinol (Hyp-C6-NHAc), N-(caproyl-4-hydroxyprolinol (Hyp-C6), N-(acetyl-4-hydroxyprolinol (Hyp-NHAc), thymidine-2′-0-deoxythymidine (ether), N-(aminocaproyl)-4-hydroxyprolinol (Hyp-C6-amino), 2-docosanoyl-uridine-3′- phosphate, inverted base dT(idT) and others. Disclosure of this modification can be found in U.S. Pat. Publication No. 2012/0142101.

[0144] Any of the antisense polynucleotide agents of the invention may be optionally conjugated with a GalNAc derivative ligand, as described in Section IV, below.

[0145] As described in more detail below, an agent that contains conjugations of one or more carbohydrate moieties to an antisense polynucleotide agent can optimize one or more properties of the agent. In many cases, the carbohydrate moiety will be attached to a modified subunit of the antisense polynucleotide agent. For example, the ribose sugar of one or more ribonucleotide subunits of an agent can be replaced with another moiety, e.g., a non-carbohydrate (preferably cyclic) carrier to which is attached a carbohydrate ligand. A ribonucleotide subunit in which the ribose sugar of the subunit has been so replaced is referred to herein as a ribose replacement modification subunit (RRMS). A cyclic carrier may be a carbocyclic ring system, i.e., all ring atoms are carbon atoms, or a heterocyclic ring system, i.e., one or more ring atoms may be a heteroatom, e.g., nitrogen, oxygen, sulfur. The cyclic carrier may be a monocyclic ring system, or may contain two or more rings, e.g. fused rings. The cyclic carrier may be a fully saturated ring system, or it may contain one or more double bonds.

[0146] The ligand may be attached to the polynucleotide via a carrier. The carriers include (i) at least one “backbone attachment point,” preferably two “backbone attachment points” and (ii) at least one “tethering attachment point.” A “backbone attachment point” as used herein refers to a functional group, e.g. a hydroxyl group, or generally, a bond available for, and that is suitable for incorporation of the carrier into the backbone, e.g., the phosphate, or modified phosphate, e.g., sulfur containing, backbone, of a ribonucleic acid. A “tethering attachment point” (TAP) in some embodiments refers to a constituent ring atom of the cyclic carrier, e.g., a carbon atom or a heteroatom (distinct from an atom which provides a backbone attachment point), that connects a selected moiety. The moiety can be, e.g., a carbohydrate, e.g. monosaccharide, disaccharide, trisaccharide, tetrasaccharide, oligosaccharide and polysaccharide. Optionally, the selected moiety is connected by an intervening tether to the cyclic carrier. Thus, the cyclic carrier will often include a functional group, e.g., an amino group, or generally, provide a bond, that is suitable for incorporation or tethering of another chemical entity, e.g., a ligand to the constituent ring.

[0147] The antisense polynucleotide agents may be conjugated to a ligand via a carrier, wherein the carrier can be cyclic group or acyclic group; preferably, the cyclic group is selected from pyrrolidinyl, pyrazolinyl, pyrazolidinyl, imidazolinyl, imidazolidinyl, piperidinyl, piperazinyl, [1,3]dioxolane, oxazolidinyl, isoxazolidinyl, morpholinyl, thiazolidinyl, isothiazolidinyl, quinoxalinyl, pyridazinonyl, tetrahydrofuryl and and decalin; preferably, the acyclic group is selected from serinol backbone or diethanolamine backbone.

[0148] In certain specific embodiments, the antisense polynucleotide agent for use in the methods of the invention is an agent selected from the group of agents listed in Table 3. These agents may further comprise a ligand, as described in Section IV, below.

### A. Antisense Polynucleotide Agents Comprising Motifs

[0149] In certain embodiments of the invention, at least one of the contiguous nucleotides of the antisense polynucleotide agents of the invention may be a modified nucleotide. In one embodiment, the modified nucleotide comprises one or more modified sugars. In other embodiments, the modified nucleotide comprises one or more modified nucleobases. In yet other embodiments, the modified nucleotide comprises one or more modified internucleoside linkages. In some embodiments, the modifications (sugar modifications, nucleobase modifications, and/or linkage modifications) define a pattern or motif. In one embodiment, the patterns of modifications of sugar moieties, internucleoside linkages, and nucleobases are each independent of one another.

[0150] Antisense polynucleotide agents having modified oligonucleotides arranged in patterns, or motifs may, for example, confer to the agents properties such as enhanced inhibitory activity, increased binding affinity for a target nucleic acid, or resistance to degradation by in vivo nucleases. For example, such agents may contain at least one region modified so as to confer increased resistance to nuclease degradation, increased cellular uptake, increased binding affinity for the target nucleic acid, and/or increased inhibitory activity. A second region of such agents may optionally serve as a substrate for the cellular endonuclease RNase H, which cleaves the RNA strand of an RNA:DNA duplex.

[0151] An exemplary antisense polynucleotide agent having modified oligonucleotides arranged in patterns, or motifs is a gapmer. In a “gapmer”, an internal region or “gap” having a plurality of linked nucleotides that supports RNaseH cleavage is positioned between two external flanking regions or “wings” having a plurality of linked nucleotides that are chemically distinct from the linked nucleotides of the internal region. The gap segment generally serves as the substrate for endonuclease cleavage, while the wing segments comprise modified nucleotides.

[0152] The three regions of a gapmer motif (the 5 ‘-wing, the gap, and the 3 ‘-wing) form a contiguous sequence of nucleotides and may be described as “X-Y-Z″, wherein “X” represents the length of the 5-wing, “Y” represents the length of the gap, and “Z” represents the length of the 3′-wing. In one embodiment, a gapmer described as “X-Y-Z″ has a configuration such that the gap segment is positioned immediately adjacent to each of the 5′ wing segment and the 3′ wing segment. Thus, no intervening nucleotides exist between the 5′ wing segment and gap segment, or the gap segment and the 3′ wing segment. Any of the antisense compounds described herein can have a gapmer motif. In some embodiments, X and Z are the same, in other embodiments they are different.

[0153] In certain embodiments, the regions of a gapmer are differentiated by the types of modified nucleotides in the region. The types of modified nucleotides that may be used to differentiate the regions of a gapmer, in some embodiments, include β-D-ribonucleotides, β-D-deoxyribonucleotides, 2′-modified nucleotides, e.g., 2′-modified nucleotides (e.g., 2′-MOE, and 2′-O-CH3), and bicyclic sugar modified nucleotides (e.g., those having a 4′-(CH2)n-O-2′ bridge, where n=1 or n=2).

[0154] In one embodiment, at least some of the modified nucleotides of each of the wings may differ from at least some of the modified nucleotides of the gap. For example, at least some of the modified nucleotides of each wing that are closest to the gap (the 3 ‘-most nucleotide of the 5′-wing and the 5′-most nucleotide of the 3 -wing) differ from the modified nucleotides of the neighboring gap nucleotides, thus defining the boundary between the wings and the gap. In certain embodiments, the modified nucleotides within the gap are the same as one another. In certain embodiments, the gap includes one or more modified nucleotides that differ from the modified nucleotides of one or more other nucleotides of the gap.

[0155] The length of the 5′- wing (X) of a gapmer may be 1 to 6 nucleotides in length, e.g., 2 to 6, 2 to 5, 3 to 6, 3 to 5, 1 to 5, 1 to 4, 1 to 3, 2 to 4 nucleotides in length, e.g., 1, 2, 3, 4, 5, or 6 nucleotides in length.

[0156] The length of the 3′- wing (Z) of a gapmer may be 1 to 6 nucleotides in length, e.g., 2 to 6, 2-5, 3 to 6, 3 to 5, 1 to 5, 1 to 4, 1 to 3, 2 to 4 nucleotides in length, e.g., 1, 2, 3, 4, 5, or 6 nucleotides in length.

[0157] The length of the gap (Y) of a gapmer may be 5 to 14 nucleotides in length, e.g., 5 to 13, 5 to 12, 5 to 11, 5 to 10, 5 to 9, 5 to 8, 5 to 7, 5 to 6, 6 to 14, 6 to 13, 6 to 12, 6 to 11, 6 to 10, 6 to 9, 6 to 8, 6 to 7, 7 to 14, 7 to 13, 7 to 12, 7 to 11, 7 to 10, 7 to 9, 7 to 8, 8 to 14, 8 to 13, 8 to 12, 8 to 11, 8 to 10, 8 to 9, 9 to 14, 9 to 13, 9 to 12, 9 to 11, 9 to 10, 10 to 14, 10 to 13, 10 to 12, 10 to 11, 11 to 14, 11 to 13, 11 to 12, 12 to 14, 12 to 13, or 13 to 14 nucleotides in length, e.g., 5, 6, 7, 8, 9, 10, 11, 12, 13, or 14 nucleotides in length.

[0158] In some embodiments of the invention X consists of 2, 3, 4, 5 or 6 nucleotides, Y consists of 7, 8, 9, 10, 11, or 12 nucleotides, and Z consists of 2, 3, 4, 5 or 6 nucleotides. Such gapmers include (X-Y-Z) 2-7-2, 2-7-3, 2-7-4, 2-7-5, 2-7-6, 3-7-2, 3-7-3, 3-7-4, 3-7-5, 3-7-6, 4-7-3, 4-7-4, 4-7-5, 4-7-6, 5-7-3, 5-7-4, 5-7-5, 5-7-6, 6-7-3, 6-7-4, 6-7-5, 6-7-6, 3-7-3, 3-7-4, 3-7-5, 3-7-6, 4-7-3, 4-7-4, 4-7-5, 4-7-6, 5-7-3, 5-7-4, 5-7-5, 5-7-6, 6-7-3, 6-7-4, 6-7-5, 6-7-6, 2-8-2, 2-8-3, 2-8-4, 2-8-5, 2-8-6, 3-8-2, 3-8-3, 3-8-4, 3-8-5, 3-8-6, 4-8-3, 4-8-4, 4-8-5, 4-8-6, 5-8-3, 5-8-4, 5-8-5, 5-8-6, 6-8-3, 6-8-4, 6-8-5, 6-8-6, 2-9-2, 2-9-3, 2-9-4, 2-9-5, 2-9-6, 3-9-2, 3-9-3, 3-9-4, 3-9-5, 3-9-6, 4-9-3, 4-9-4, 4-9-5, 4-9-6, 5-9-3, 5-9-4, 5-9-5, 5-9-6, 6-9-3, 6-9-4, 6-9-5, 6-9-6, 2-10-2, 2-10-3, 2-10-4, 2-10-5, 2-10-6, 3-10-2, 3-10-3, 3-10-4, 3-10-5, 3-10-6, 4-10-3, 4-10-4, 4-10-5, 4-10-6, 5-10-3, 5-10-4, 5-10-5, 5-10-6, 6-10-3, 6-10-4, 6-10-5, 6-10-6, 2-11-2, 2-11-3, 2-11-4, 2-11-5, 2-11-6, 3-11-2, 3-11-3, 3-11-4, 3-11-5, 3-11-6, 4-11-3, 4-11-4, 4-11-5, 4-11-6, 5-11-3, 5-11-4, 5-11-5, 5-11-6, 6-11-3, 6-11-4, 6-11-5, 6-11-6, 2-12-2, 2-12-3, 2-12-4, 2-12-5, 2-12-6, 3-12-2, 3-12-3, 3-12-4, 3-12-5, 3-12-6, 4-12-3, 4-12-4, 4-12-5, 4-12-6, 5-12-3, 5-12-4, 5-12-5, 5-12-6, 6-12-3, 6-12-4, 6-12-5, or 6-12-6.

[0159] In some embodiments of the invention, antisense polynucleotide agents targeting AGT include a 5-10-5 gapmer motif. In other embodiments of the invention, antisense polynucleotide agents targeting AGT include a 4-10-4 gapmer motif. In another embodiment of the invention, antisense polynucleotide agents targeting AGT include a 3-10-3 gapmer motif. In yet other embodiments of the invention, antisense polynucleotide agents targeting AGT include a 2-10-2 gapmer motif.

[0160] The 5′- wing and/or 3′-wing of a gapmer may independently include 1-6 modified nucleotides, e.g., 1, 2, 3, 4, 5, or 6 modified nucleotides.

[0161] In some embodiment, the 5′-wing of a gapmer includes at least one modified nucleotide. In one embodiment, the 5′- wing of a gapmer comprises at least two modified nucleotides. In another embodiment, the 5′- wing of a gapmer comprises at least three modified nucleotides. In yet another embodiment, the 5′- wing of a gapmer comprises at least four modified nucleotides. In another embodiment, the 5′- wing of a gapmer comprises at least five modified nucleotides. In certain embodiments, each nucleotide of the 5′-wing of a gapmer is a modified nucleotide.

[0162] In some embodiments, the 3′-wing of a gapmer includes at least one modified nucleotide. In one embodiment, the 3′- wing of a gapmer comprises at least two modified nucleotides. In another embodiment, the 3′- wing of a gapmer comprises at least three modified nucleotides. In yet another embodiment, the 3′- wing of a gapmer comprises at least four modified nucleotides. In another embodiment, the 3′- wing of a gapmer comprises at least five modified nucleotides. In certain embodiments, each nucleotide of the 3′-wing of a gapmer is a modified nucleotide.

[0163] In certain embodiments, the regions of a gapmer are differentiated by the types of sugar moieties of the nucleotides. In one embodiment, the nucleotides of each distinct region comprise uniform sugar moieties. In other embodiments, the nucleotides of each distinct region comprise different sugar moieties. In certain embodiments, the sugar nucleotide modification motifs of the two wings are the same as one another. In certain embodiments, the sugar nucleotide modification motifs of the 5′-wing differs from the sugar nucleotide modification motif of the 3′-wing.

[0164] The 5′-wing of a gapmer may include 1-6 modified nucleotides, e.g., 1, 2, 3, 4, 5, or 6 modified nucleotides.

[0165] In one embodiment, at least one modified nucleotide of the 5′-wing of a gapmer is a bicyclic nucleotide, such as a constrained ethyl nucleotide, or an LNA. In another embodiment, the 5′-wing of a gapmer includes 2, 3, 4, or 5 bicyclic nucleotides. In some embodiments, each nucleotide of the 5′- wing of a gapmer is a bicyclic nucleotide.

[0166] In one embodiment, the 5′-wing of a gapmer includes at least 1, 2, 3, 4, or 5 constrained ethyl nucleotides. In some embodiments, each nucleotide of the 5′- wing of a gapmer is a constrained ethyl nucleotide.

[0167] In one embodiment, the 5′-wing of a gapmer comprises at least one LNA nucleotide. In another embodiment, the 5′-wing of a gapmer includes 2, 3, 4, or 5 LNA nucleotides. In other embodiments, each nucleotide of the 5′- wing of a gapmer is an LNA nucleotide.

[0168] In certain embodiments, at least one modified nucleotide of the 5′- wing of a gapmer is a non-bicyclic modified nucleotide, e.g., a 2 ‘-substituted nucleotide. A “2 ‘-substituted nucleotide” is a nucleotide comprising a modification at the 2′-position which is other than H or OH, such as a 2′-OMe nucleotide, or a 2′-MOE nucleotide. In one embodiment, the 5′-wing of a gapmer comprises 2, 3, 4, or 5 2 ‘-substituted nucleotides. In one embodiment, each nucleotide of the 5′-wing of a gapmer is a 2 ‘-substituted nucleotide.

[0169] In one embodiment, the 5′- wing of a gapmer comprises at least one 2′-OMe nucleotide. In one embodiment, the 5′- wing of a gapmer comprises at least 2, 3, 4, or 5 2′-OMe nucleotides. In one embodiment, each of the nucleotides of the 5′- wing of a gapmer comprises a 2′-OMe nucleotide.

[0170] In one embodiment, the 5′- wing of a gapmer comprises at least one 2′- MOE nucleotide. In one embodiment, the 5′- wing of a gapmer comprises at least 2, 3, 4, or 5 2′-MOE nucleotides. In one embodiment, each of the nucleotides of the 5′- wing of a gapmer comprises a 2′- MOE nucleotide.

[0171] In certain embodiments, the 5′- wing of a gapmer comprises at least one 2′-deoxynucleotide. In certain embodiments, each nucleotide of the 5′- wing of a gapmer is a 2′-deoxynucleotide. In a certain embodiments, the 5′- wing of a gapmer comprises at least one ribonucleotide. In certain embodiments, each nucleotide of the 5′- wing of a gapmer is a ribonucleotide.

[0172] The 3′-wing of a gapmer may include 1-6 modified nucleotides, e.g., 1, 2, 3, 4, 5, or 6 modified nucleotides.

[0173] In one embodiment, at least one modified nucleotide of the 3′-wing of a gapmer is a bicyclic nucleotide, such as a constrained ethyl nucleotide, or an LNA. In another embodiment, the 3′-wing of a gapmer includes 2, 3, 4, or 5 bicyclic nucleotides. In some embodiments, each nucleotide of the 3′-wing of a gapmer is a bicyclic nucleotide.

[0174] In one embodiment, the 3′-wing of a gapmer includes at least one constrained ethyl nucleotide. In another embodiment, the 3′-wing of a gapmer includes 2, 3, 4, or 5 constrained ethyl nucleotides. In some embodiments, each nucleotide of the 3′-wing of a gapmer is a constrained ethyl nucleotide.

[0175] In one embodiment, the 3′-wing of a gapmer comprises at least one LNA nucleotide. In another embodiment, the 3′-wing of a gapmer includes 2, 3, 4, or 5 LNA nucleotides. In other embodiments, each nucleotide of the 3′-wing of a gapmer is an LNA nucleotide.

[0176] In certain embodiments, at least one modified nucleotide of the 3′-wing of a gapmer is a non-bicyclic modified nucleotide, e.g., a 2 ‘-substituted nucleotide. In one embodiment, the 3′-wing of a gapmer comprises 2, 3, 4, or 5 2 ‘-substituted nucleotides. In one embodiment, each nucleotide of the 3′-wing of a gapmer is a 2 ‘-substituted nucleotide.

[0177] In one embodiment, the 3′-wing of a gapmer comprises at least one 2′-OMe nucleotide. In one embodiment, the 3′-wing of a gapmer comprises at least 2, 3, 4, or 5 2′-OMe nucleotides. In one embodiment, each of the nucleotides of the 3′-wing of a gapmer comprises a 2′-OMe nucleotide.

[0178] In one embodiment, the 3′-wing of a gapmer comprises at least one 2′- MOE nucleotide. In one embodiment, the 3′-wing of a gapmer comprises at least 2, 3, 4, or 5 2′-MOE nucleotides. In one embodiment, each of the nucleotides of the 3′-wing of a gapmer comprises a 2′- MOE nucleotide.

[0179] In certain embodiments, the 3′-wing of a gapmer comprises at least one 2′-deoxynucleotide. In certain embodiments, each nucleotide of the 3′-wing of a gapmer is a 2′-deoxynucleotide. In a certain embodiments, the 3′-wing of a gapmer comprises at least one ribonucleotide. In certain embodiments, each nucleotide of the 3′-wing of a gapmer is a ribonucleotide.

[0180] The gap of a gapmer may include 5-14 modified nucleotides, e.g., 5, 6, 7, 8, 9, 10, 11, 12, 13, or 14 modified nucleotides.

[0181] In one embodiment, the gap of a gapmer comprises at least one 5-methylcytosine. In one embodiment, the gap of a gapmer comprises at least 2, 3, 4, 5, 6, 7, 8, 9, 10, 11, 12, or 13 5-methylcytosines. In one embodiment, all of the nucleotides of the the gap of a gapmer are 5-methylcytosines.

[0182] In one embodiment, the gap of a gapmer comprises at least one 2′-deoxynucleotide. In one embodiment, the gap of a gapmer comprises at least 2, 3, 4, 5, 6, 7, 8, 9, 10, 11, 12, or 13 2′-deoxynucleotides. In one embodiment, all of the nucleotides of the the gap of a gapmer are 2′-deoxynucleotides.

[0183] A gapmer may include one or more modified internucleotide linkages. In some embodiments, a gapmer includes one or more phosphodiester internucleotide linkages. In other embodiments, a gapmer includes one or more phosphorothioate internucleotide linkages.

[0184] In one embodiment, each nucleotide of a 5′-wing of a gapmer are linked via a phosphorothioate internucleotide linkage. In another embodiment, each nucleotide of a 3′-wing of a gapmer are linked via a phosphorothioate internucleotide linkage. In yet another embodiment, each nucleotide of a gap segment of a gapmer is linked via a phosphorothioate internucleotide linkage. In one embodiment, all of the nucleotides in a gapmer are linked via phosphorothioate internucleotide linkages.

[0185] In one embodiment, an antisense polynucleotide agent targeting an AGT gene comprises a gap segment of ten 2′-deoxyribonucleotides positioned immediately adjacent to and between a 5′-wing segment comprising five nucleotides and a 3′-wing segment comprising 5 nucleotides.

[0186] In another embodiment, an antisense polynucleotide agent targeting an AGT gene comprises a gap segment of ten 2′-deoxyribonucleotides positioned immediately adjacent to and between a 5′-wing segment comprising four nucleotides and a 3′-wing segment comprising four nucleotides.

[0187] In another embodiment, an antisense polynucleotide agent targeting an AGT gene comprises a gap segment of ten 2′-deoxyribonucleotides positioned immediately adjacent to and between a 5′-wing segment comprising three nucleotides and a 3′-wing segment comprising three nucleotides.

[0188] In another embodiment, an antisense polynucleotide agent targeting an AGT gene comprises a gap segment of ten 2′-deoxyribonucleotides positioned immediately adjacent to and between a 5′-wing segment comprising two nucleotides and a 3′-wing segment comprising two nucleotides.

[0189] In one embodiment, each nucleotide of a 5-wing flanking a gap segment of 10 2′-deoxyribonucleotides comprises a modified nucleotide. In another embodiment, each nucleotide of a 3-wing flanking a gap segment of 10 2′-deoxyribonucleotides comprises a modified nucleotide. In one embodiment, each of the modified 5′-wing nucleotides and each of the modified 3′-wing nucleotides comprise a 2′-sugar modification. In one embodiment, the 2′-sugar modification is a 2′-OMe modification. In another embodiment, the 2′-sugar modification is a 2′-MOE modification. In one embodiment, each of the modified 5′-wing nucleotides and each of the modified 3′-wing nucleotides comprise a bicyclic nucleotide. In one embodiment, the bicyclic nucleotide is a constrained ethyl nucleotide. In another embodiment, the bicyclic nucleotide is an LNA nucleotide. In one embodiment, each cytosine in an antisense polynucleotide agent targeting an AGT gene is a 5-methylcytosine.

[0190] In one embodiment, an antisense polynucleotide agent targeting an AGT gene comprises a gap segment of ten 2′-deoxyribonucleotides positioned immediately adjacent to and between a 5′-wing segment comprising five nucleotides comprising a 2′OMe modification and a 3′-wing segment comprising five nucleotides comprising a 2′OMe modification, wherein each internucleotde linkage of the agent is a phosphorothioate linkage. In one embodiment, each cytosine of the agent is a 5-methylcytosine. In one embodiment, the agent further comprises a ligand.

[0191] In one embodiment, an antisense polynucleotide agent targeting an AGT gene comprises a gap segment of ten 2′-deoxyribonucleotides positioned immediately adjacent to and between a 5′-wing segment comprising five nucleotides comprising a 2′MOE modification and a 3′-wing segment comprising five nucleotides comprising a 2′MOE modification, wherein each internucleotide linkage of the agent is a phosphorothioate linkage. In one embodiment, each cytosine of the agent is a 5-methylcytosine. In one embodiment, the agent further comprises a ligand.

[0192] In one embodiment, an antisense polynucleotide agent targeting an AGT gene comprises a gap segment of ten 2′-deoxyribonucleotides positioned immediately adjacent to and between a 5′-wing segment comprising five constrained ethyl nucleotides and a 3′-wing segment comprising five constrained ethyl nucleotides, wherein each internucleoitde linkage of the agent is a phosphorothioate linkage. In one embodiment, each cytosine of the agent is a 5-methylcytosine.

[0193] In one embodiment, an antisense polynucleotide agent targeting an AGT gene comprises a gap segment of ten 2′-deoxyribonucleotides positioned immediately adjacent to and between a 5′-wing segment comprising five LNA nucleotides and a 3′-wing segment comprising five LNA nucleotides, wherein each internucleotide linkage of the agent is a phosphorothioate linkage. In one embodiment, each cytosine of the agent is a 5-methylcytosine.

[0194] In one embodiment, an antisense polynucleotide agent targeting an AGT gene comprises a gap segment of ten 2′-deoxyribonucleotides positioned immediately adjacent to and between a 5′-wing segment comprising four nucleotides comprising a 2′OMe modification and a 3′-wing segment comprising four nucleotides comprising a 2′OMe modification, wherein each internucleotde linkage of the agent is a phosphorothioate linkage. In one embodiment, each cytosine of the agent is a 5-methylcytosine.

[0195] In one embodiment, an antisense polynucleotide agent targeting an AGT gene comprises a gap segment of ten 2′-deoxyribonucleotides positioned immediately adjacent to and between a 5′-wing segment comprising four nucleotides comprising a 2′MOE modification and a 3′-wing segment comprising four nucleotides comprising a 2′MOE modification, wherein each internucleotide linkage of the agent is a phosphorothioate linkage. In one embodiment, each cytosine of the agent is a 5-methylcytosine.

[0196] In one embodiment, an antisense polynucleotide agent targeting an AGT gene comprises a gap segment of ten 2′-deoxyribonucleotides positioned immediately adjacent to and between a 5′-wing segment comprising four constrained ethyl nucleotides and a 3′-wing segment comprising four constrained ethyl nucleotides, wherein each internucleoitde linkage of the agent is a phosphorothioate linkage. In one embodiment, each cytosine of the agent is a 5-methylcytosine.

[0197] In one embodiment, an antisense polynucleotide agent targeting an AGT gene comprises a gap segment of ten 2′-deoxyribonucleotides positioned immediately adjacent to and between a 5′-wing segment comprising four LNA nucleotides and a 3′-wing segment comprising four LNA nucleotides, wherein each internucleotide linkage of the agent is a phosphorothioate linkage. In one embodiment, each cytosine of the agent is a 5-methylcytosine.

[0198] In one embodiment, an antisense polynucleotide agent targeting an AGT gene comprises a gap segment of ten 2′-deoxyribonucleotides positioned immediately adjacent to and between a 5′-wing segment comprising three nucleotides comprising a 2′OMe modification and a 3′-wing segment comprising three nucleotides comprising a 2′OMe modification, wherein each internucleotde linkage of the agent is a phosphorothioate linkage. In one embodiment, each cytosine of the agent is a 5-methylcytosine.

[0199] In one embodiment, an antisense polynucleotide agent targeting an AGT gene comprises a gap segment of ten 2′-deoxyribonucleotides positioned immediately adjacent to and between a 5′-wing segment comprising three nucleotides comprising a 2′MOE modification and a 3′-wing segment comprising three nucleotides comprising a 2′MOE modification, wherein each internucleotide linkage of the agent is a phosphorothioate linkage. In one embodiment, each cytosine of the agent is a 5-methylcytosine.

[0200] In one embodiment, an antisense polynucleotide agent targeting an AGT gene comprises a gap segment of ten 2′-deoxyribonucleotides positioned immediately adjacent to and between a 5′-wing segment comprising three constrained ethyl nucleotides and a 3′-wing segment comprising three constrained ethyl nucleotides, wherein each internucleoitde linkage of the agent is a phosphorothioate linkage. In one embodiment, each cytosine of the agent is a 5-methylcytosine.

[0201] In one embodiment, an antisense polynucleotide agent targeting an AGT gene comprises a gap segment of ten 2′-deoxyribonucleotides positioned immediately adjacent to and between a 5′-wing segment comprising three LNA nucleotides and a 3′-wing segment comprising three LNA nucleotides, wherein each internucleotide linkage of the agent is a phosphorothioate linkage. In one embodiment, each cytosine of the agent is a 5-methylcytosine.

[0202] In one embodiment, an antisense polynucleotide agent targeting an AGT gene comprises a gap segment of ten 2′-deoxyribonucleotides positioned immediately adjacent to and between a 5′-wing segment comprising two nucleotides comprising a 2′OMe modification and a 3′-wing segment comprising two nucleotides comprising a 2′OMe modification, wherein each internucleotde linkage of the agent is a phosphorothioate linkage. In one embodiment, each cytosine of the agent is a 5-methylcytosine.

[0203] In one embodiment, an antisense polynucleotide agent targeting an AGT gene comprises a gap segment of ten 2′-deoxyribonucleotides positioned immediately adjacent to and between a 5′-wing segment comprising two nucleotides comprising a 2′MOE modification and a 3′-wing segment comprising two nucleotides comprising a 2′MOE modification, wherein each internucleotide linkage of the agent is a phosphorothioate linkage. In one embodiment, each cytosine of the agent is a 5-methylcytosine.

[0204] In one embodiment, an antisense polynucleotide agent targeting an AGT gene comprises a gap segment of ten 2′-deoxyribonucleotides positioned immediately adjacent to and between a 5′-wing segment comprising two constrained ethyl nucleotides and a 3′-wing segment comprising two constrained ethyl nucleotides, wherein each internucleoitde linkage of the agent is a phosphorothioate linkage. In one embodiment, each cytosine of the agent is a 5-methylcytosine.

[0205] In one embodiment, an antisense polynucleotide agent targeting an AGT gene comprises a gap segment of ten 2′-deoxyribonucleotides positioned immediately adjacent to and between a 5′-wing segment comprising two LNA nucleotides and a 3′-wing segment comprising two LNA nucleotides, wherein each internucleotide linkage of the agent is a phosphorothioate linkage. In one embodiment, each cytosine of the agent is a 5-methylcytosine.

[0206] Further gapmer designs suitable for use in the agents, compositions, and methods of the invention are disclosed in, for example, U.S. Pat. Nos. 7,687,617 and 8,580,756; U.S. Pat. Publication Nos. 20060128646, 20090209748, 20140128586, 20140128591, 20100210712, and 20080015162A1; and International Publication No. WO 2013/159108, the entire content of each of which are incorporated herein by reference.

### IV. Antisense Polynucleotide Agents Conjugated to Ligands

[0207] Another modification of the polynucleotide agents of the invention involves chemically linking to the agent one or more ligands, moieties or conjugates that enhance the activity, cellular distribution or cellular uptake of the antisense polynucleotide agent. Such moieties include but are not limited to lipid moieties such as a cholesterol moiety (Letsinger et al., Proc. Natl. Acid. Sci. USA, 1989, 86: 6553-6556), cholic acid (Manoharan et al., Biorg. Med. Chem. Let., 1994, 4:1053-1060), a thioether, e.g., beryl-S-tritylthiol (Manoharan et al., Ann. N.Y. Acad. Sci., 1992, 660:306-309; Manoharan et al., Biorg. Med. Chem. Let., 1993, 3:2765-2770), a thiocholesterol (Oberhauser et al., Nucl. Acids Res., 1992, 20:533-538), an aliphatic chain, e.g., dodecandiol or undecyl residues (Saison-Behmoaras et al., EMBO J, 1991, 10:1111-1118; Kabanov et al., FEBS Lett., 1990, 259:327-330; Svinarchuk et al., Biochimie, 1993, 75:49-54), a phospholipid, e.g., di-hexadecyl-rac-glycerol or triethylammonium 1,2-di-O-hexadecyl-rac-glycero-3-phosphonate (Manoharan et al., Tetrahedron Lett., 1995, 36:3651-3654; Shea et al., Nucl. Acids Res., 1990, 18:3777-3783), a polyamine or a polyethylene glycol chain (Manoharan et al., Nucleosides & Nucleotides, 1995, 14:969-973), or adamantane acetic acid (Manoharan et al., Tetrahedron Lett., 1995, 36:3651-3654), a palmityl moiety (Mishra et al., Biochim. Biophys. Acta, 1995, 1264:229-237), or an octadecylamine or hexylamino-carbonyloxycholesterol moiety (Crooke et al., J. Pharmacol. Exp. Ther., 1996, 277:923-937).

[0208] In one embodiment, a ligand alters the distribution, targeting or lifetime of an antisense polynucleotide agent into which it is incorporated. In preferred embodiments a ligand provides an enhanced affinity for a selected target, e.g., molecule, cell or cell type, compartment, e.g., a cellular or organ compartment, tissue, organ or region of the body, as, e.g., compared to a species absent such a ligand. Preferred ligands will not take part in hybridization of an antisense polynucleotide agent to the targeted mRNA.

[0209] Ligands can include a naturally occurring substance, such as a protein (e.g., human serum albumin (HSA), low-density lipoprotein (LDL), or globulin); carbohydrate (e.g., a dextran, pullulan, chitin, chitosan, inulin, cyclodextrin, N-acetylgalactosamine, or hyaluronic acid); or a lipid. The ligand can also be a recombinant or synthetic molecule, such as a synthetic polymer, e.g., a synthetic polyamino acid. Examples of polyamino acids include polyamino acid is a polylysine (PLL), poly L-aspartic acid, poly L-glutamic acid, styrenemaleic acid anhydride copolymer, poly(L-lactide-co-glycolied) copolymer, divinyl ether-maleic anhydride copolymer, N-(2-hydroxypropyl)methacrylamide copolymer (HMPA), polyethylene glycol (PEG), polyvinyl alcohol (PVA), polyurethane, poly(2-ethylacryllic acid), N-isopropylacrylamide polymers, or polyphosphazine. Example of polyamines include: polyethylenimine, polylysine (PLL), spermine, spermidine, polyamine, pseudopeptide-polyamine, peptidomimetic polyamine, dendrimer polyamine, arginine, amidine, protamine, cationic lipid, cationic porphyrin, quaternary salt of a polyamine, or an alpha helical peptide.

[0210] Ligands can also include targeting groups, e.g., a cell or tissue targeting agent, e.g., a lectin, glycoprotein, lipid or protein, e.g., an antibody, that binds to a specified cell type such as a kidney cell. A targeting group can be a thyrotropin, melanotropin, lectin, glycoprotein, surfactant protein A, Mucin carbohydrate, multivalent lactose, multivalent galactose, N-acetyl-galactosamine, N-acetyl-gulucoseamine multivalent mannose, multivalent fucose, glycosylated polyaminoacids, multivalent galactose, transferrin, bisphosphonate, polyglutamate, polyaspartate, a lipid, cholesterol, a steroid, bile acid, folate, vitamin B12, vitamin A, biotin, or an RGD peptide or RGD peptide mimetic.

[0211] Other examples of ligands include dyes, intercalating agents (e.g. acridines), crosslinkers (e.g. psoralene, mitomycin C), porphyrins (TPPC4, texaphyrin, Sapphyrin), polycyclic aromatic hydrocarbons (e.g., phenazine, dihydrophenazine), artificial endonucleases (e.g. EDTA), lipophilic molecules, e.g., cholesterol, cholic acid, adamantane acetic acid, 1-pyrene butyric acid, dihydrotestosterone, 1,3-Bis-O(hexadecyl)glycerol, geranyloxyhexyl group, hexadecylglycerol, borneol, menthol, 1,3-propanediol, heptadecyl group, palmitic acid, myristic acid,O3-(oleoyl)lithocholic acid, O3-(oleoyl)cholenic acid, dimethoxytrityl, or phenoxazine)and peptide conjugates (e.g., antennapedia peptide, Tat peptide), alkylating agents, phosphate, amino, mercapto, PEG (e.g., PEG-40K), MPEG, [MPEG]₂, polyamino, alkyl, substituted alkyl, radiolabeled markers, enzymes, haptens (e.g. biotin), transport/absorption facilitators (e.g., aspirin, vitamin E, folic acid), synthetic ribonucleases (e.g., imidazole, bisimidazole, histamine, imidazole clusters, acridine-imidazole conjugates, Eu3+ complexes of tetraazamacrocycles), dinitrophenyl, HRP, or AP.

[0212] Ligands can be proteins, e.g., glycoproteins, or peptides, e.g., molecules having a specific affinity for a co-ligand, or antibodies e.g., an antibody, that binds to a specified cell type such as a hepatic cell. Ligands can also include hormones and hormone receptors. They can also include non-peptidic species, such as lipids, lectins, carbohydrates, vitamins, cofactors, multivalent lactose, multivalent galactose, N-acetyl-galactosamine, N-acetyl-gulucosamine multivalent mannose, or multivalent fucose. The ligand can be, for example, a lipopolysaccharide, an activator of p38 MAP kinase, or an activator of NF-κB.

[0213] The ligand can be a substance, e.g., a drug, which can increase the uptake of the antisense polynucleotide agent into the cell, for example, by disrupting the cell’s cytoskeleton, e.g., by disrupting the cell’s microtubules, microfilaments, and/or intermediate filaments. The drug can be, for example, taxon, vincristine, vinblastine, cytochalasin, nocodazole, japlakinolide, latrunculin A, phalloidin, swinholide A, indanocine, or myoservin.

[0214] In some embodiments, a ligand attached to an antisense polynucleotide agent as described herein acts as a pharmacokinetic modulator (PK modulator). PK modulators include lipophiles, bile acids, steroids, phospholipid analogues, peptides, protein binding agents, PEG, vitamins etc. Exemplary PK modulators include, but are not limited to, cholesterol, fatty acids, cholic acid, lithocholic acid, dialkylglycerides, diacylglyceride, phospholipids, sphingolipids, naproxen, ibuprofen, vitamin E, biotin etc. Oligonucleotides that comprise a number of phosphorothioate linkages are also known to bind to serum protein, thus short oligonucleotides, e.g., oligonucleotides of about 5 bases, 10 bases, 15 bases or 20 bases, comprising multiple of phosphorothioate linkages in the backbone are also amenable to the present invention as ligands (e.g. as PK modulating ligands). In addition, aptamers that bind serum components (e.g. serum proteins) are also suitable for use as PK modulating ligands in the embodiments described herein.

[0215] Ligand-conjugated polynucleotides of the invention may be synthesized by the use of a polynucleotide that bears a pendant reactive functionality, such as that derived from the attachment of a linking molecule onto the oligonucleotide (described below). This reactive polynucleotide may be reacted directly with commercially-available ligands, ligands that are synthesized bearing any of a variety of protecting groups, or ligands that have a linking moiety attached thereto.

[0216] The polynucleotides used in the conjugates of the present invention may be conveniently and routinely made through the well-known technique of solid-phase synthesis. Equipment for such synthesis is sold by several vendors including, for example, Applied Biosystems® (Foster City, Calif.). Any other means for such synthesis known in the art may additionally or alternatively be employed. It is also known to use similar techniques to prepare other polynucleotides, such as the phosphorothioates and alkylated derivatives.

[0217] In the ligand-conjugated polynucleotides and ligand-molecule bearing sequence-specific linked nucleosides of the present invention, the polynucleotides and polynucleosides may be assembled on a suitable DNA synthesizer utilizing standard nucleotide or nucleoside precursors, or nucleotide or nucleoside conjugate precursors that already bear the linking moiety, ligand-nucleotide or nucleoside-conjugate precursors that already bear the ligand molecule, or non-nucleoside ligand-bearing building blocks.

[0218] When using nucleotide-conjugate precursors that already bear a linking moiety, the synthesis of the sequence-specific linked nucleosides is typically completed, and the ligand molecule is then reacted with the linking moiety to form the ligand-conjugated oligonucleotide. In some embodiments, the polynucleotides or linked nucleosides of the present invention are synthesized by an automated synthesizer using phosphoramidites derived from ligand-nucleoside conjugates in addition to the standard phosphoramidites and non-standard phosphoramidites that are commercially available and routinely used in oligonucleotide synthesis.

### A. Lipid Conjugates

[0219] In one embodiment, the ligand or conjugate is a lipid or lipid-based molecule. Such a lipid or lipid-based molecule preferably binds a serum protein, e.g., human serum albumin (HSA). An HSA binding ligand allows for distribution of the conjugate to a target tissue, e.g., a non-kidney target tissue of the body. For example, the target tissue can be the liver, including parenchymal cells of the liver. Other molecules that can bind HSA can also be used as ligands. For example, naproxen or aspirin can be used. A lipid or lipid-based ligand can (a) increase resistance to degradation of the conjugate, (b) increase targeting or transport into a target cell or cell membrane, and/or (c) can be used to adjust binding to a serum protein, e.g., HSA.

[0220] A lipid based ligand can be used to inhibit, e.g., control the binding of the conjugate to a target tissue. For example, a lipid or lipid-based ligand that binds to HSA more strongly will be less likely to be targeted to the kidney and therefore less likely to be cleared from the body. A lipid or lipid-based ligand that binds to HSA less strongly can be used to target the conjugate to the kidney.

[0221] In a preferred embodiment, the lipid based ligand binds HSA. Preferably, it binds HSA with a sufficient affinity such that the conjugate will be preferably distributed to a non-kidney tissue. However, it is preferred that the affinity not be so strong that the HSA-ligand binding cannot be reversed.

[0222] In another preferred embodiment, the lipid based ligand binds HSA weakly or not at all, such that the conjugate will be preferably distributed to the kidney. Other moieties that target to kidney cells can also be used in place of or in addition to the lipid based ligand.

[0223] In another aspect, the ligand is a moiety, e.g., a vitamin, which is taken up by a target cell, e.g., a proliferating cell. These are particularly useful for treating disorders characterized by unwanted cell proliferation, e.g., of the malignant or non-malignant type, e.g., cancer cells. Exemplary vitamins include vitamin A, E, and K. Other exemplary vitamins include are B vitamin, e.g., folic acid, B12, riboflavin, biotin, pyridoxal or other vitamins or nutrients taken up by target cells such as liver cells. Also included are HSA and low density lipoprotein (LDL).

### B. Cell Permeation Agents

[0224] In another aspect, the ligand is a cell-permeation agent, preferably a helical cell-permeation agent. Preferably, the agent is amphipathic. An exemplary agent is a peptide such as tat or antennopedia. If the agent is a peptide, it can be modified, including a peptidylmimetic, invertomers, non-peptide or pseudo-peptide linkages, and use of D-amino acids. The helical agent is preferably an alpha-helical agent, which preferably has a lipophilic and a lipophobic phase.

[0225] The ligand can be a peptide or peptidomimetic. A peptidomimetic (also referred to herein as an oligopeptidomimetic) is a molecule capable of folding into a defined three-dimensional structure similar to a natural peptide. The attachment of peptide and peptidomimetics to antisense polynucleotide agents can affect pharmacokinetic distribution of the agent, such as by enhancing cellular recognition and absorption. The peptide or peptidomimetic moiety can be about 5-50 amino acids long, e.g., about 5, 10, 15, 20, 25, 30, 35, 40, 45, or 50 amino acids long.

[0226] A peptide or peptidomimetic can be, for example, a cell permeation peptide, cationic peptide, amphipathic peptide, or hydrophobic peptide (e.g., consisting primarily of Tyr, Trp or Phe). The peptide moiety can be a dendrimer peptide, constrained peptide or crosslinked peptide. In another alternative, the peptide moiety can include a hydrophobic membrane translocation sequence (MTS). An exemplary hydrophobic MTS-containing peptide is RFGF having the amino acid sequence AAVALLPAVLLALLAP (SEQ ID NO: 5). An RFGF analogue (e.g., amino acid sequence AALLPVLLAAP (SEQ ID NO: 6) containing a hydrophobic MTS can also be a targeting moiety. The peptide moiety can be a “delivery” peptide, which can carry large polar molecules including peptides, oligonucleotides, and protein across cell membranes. For example, sequences from the HIV Tat protein (GRKKRRQRRRPPQ (SEQ ID NO: 7) and the Drosophila Antennapedia protein (RQIKIWFQNRRMKWKK (SEQ ID NO: 8) have been found to be capable of functioning as delivery peptides. A peptide or peptidomimetic can be encoded by a random sequence of DNA, such as a peptide identified from a phage-display library, or one-bead-one-compound (OBOC) combinatorial library (Lam et al., Nature, 354:82-84, 1991). Examples of a peptide or peptidomimetic tethered to an antisens epolynucleotide agent via an incorporated monomer unit for cell targeting purposes is an arginine-glycine-aspartic acid (RGD)-peptide, or RGD mimic. A peptide moiety can range in length from about 5 amino acids to about 40 amino acids. The peptide moieties can have a structural modification, such as to increase stability or direct conformational properties. Any of the structural modifications described below can be utilized.

[0227] An RGD peptide for use in the compositions and methods of the invention may be linear or cyclic, and may be modified, e.g., glycosylated or methylated, to facilitate targeting to a specific tissue(s). RGD-containing peptides and peptidiomimemtics may include D-amino acids, as well as synthetic RGD mimics. In addition to RGD, one can use other moieties that target the integrin ligand. Preferred conjugates of this ligand target PECAM-1 or VEGF.

[0228] A “cell permeation peptide” is capable of permeating a cell, e.g., a microbial cell, such as a bacterial or fungal cell, or a mammalian cell, such as a human cell. A microbial cell-permeating peptide can be, for example, an α-helical linear peptide (e.g., LL-37 or Ceropin P1), a disulfide bond-containing peptide (e.g., α -defensin, β-defensin or bactenecin), or a peptide containing only one or two dominating amino acids (e.g., PR-39 or indolicidin). A cell permeation peptide can also include a nuclear localization signal (NLS). For example, a cell permeation peptide can be a bipartite amphipathic peptide, such as MPG, which is derived from the fusion peptide domain of HIV-1 gp41 and the NLS of SV40 large T antigen (Simeoni et al., Nucl. Acids Res. 31:2717-2724, 2003).

### C. Carbohydrate Conjugates

[0229] In some embodiments of the compositions and methods of the invention, an antisense polynucleotide agent further comprises a carbohydrate. The carbohydrate conjugated agents are advantageous for the in vivo delivery of nucleic acids, as well as compositions suitable for in vivo therapeutic use, as described herein (see, e.g., Prakash, et al. (2014) Nuc Acid Res doi 10.1093/nar/gku531). As used herein, “carbohydrate” refers to a compound which is either a carbohydrate per se made up of one or more monosaccharide units having at least 6 carbon atoms (which can be linear, branched or cyclic) with an oxygen, nitrogen or sulfur atom bonded to each carbon atom; or a compound having as a part thereof a carbohydrate moiety made up of one or more monosaccharide units each having at least six carbon atoms (which can be linear, branched or cyclic), with an oxygen, nitrogen or sulfur atom bonded to each carbon atom. Representative carbohydrates include the sugars (mono-, di-, tri- and oligosaccharides containing from about 4, 5, 6, 7, 8, or 9 monosaccharide units), and polysaccharides such as starches, glycogen, cellulose and polysaccharide gums. Specific monosaccharides include C5 and above (e.g., C5, C6, C7, or C8) sugars; di- and trisaccharides include sugars having two or three monosaccharide units (e.g., C5, C6, C7, or C8).

[0230] In one embodiment, a carbohydrate conjugate for use in the compositions and methods of the invention is a monosaccharide. In one embodiment, a carbohydrate conjugate for use in the compositions and methods of the invention is selected from the group consisting of:

[0231] from the group consisting of:

[chemical structure]

[chemical structure]

[chemical structure]

[chemical structure]

[chemical structure]

[chemical structure]

[chemical structure]

[chemical structure]

[chemical structure]

[chemical structure]

[chemical structure]

[chemical structure]

[chemical structure]

[chemical structure]

[chemical structure]

[chemical structure]

[chemical structure]

[chemical structure]

[chemical structure]

[chemical structure]

[chemical structure]

[0232] In another embodiment, the monosaccharide is an N-acetylgalactosamine, such as

[chemical structure]

[0233] Another representative carbohydrate conjugate for use in the embodiments described herein includes, but is not limited to [chemical structure] when one of X or Y is an oligonucleotide, the other is a hydrogen.

[0234] In certain embodiments of the invention, a GalNAc or GalNAc derivative is attached to an agent of the invention via a monovalent linker. In some embodiments, a GalNAc or GalNAc derivative is attached to an agent of the invention via a bivalent linker. In yet other embodiments of the invention, a GalNAc or GalNAc derivative is attached to an agent of the invention via a trivalent linker.

[0235] In one embodiment, the agents of the invention comprise one GalNAc or GalNAc derivative attached to the agent. In another embodiment, the agents of the invention comprise a plurality (e.g., 2, 3, 4, 5, or 6) GalNAc or GalNAc derivatives, each independently attached to a plurality of nucleotides of the agent through a plurality of monovalent linkers.

[0236] In some embodiments, the carbohydrate conjugate further comprises one or more additional ligands as described above, such as, but not limited to, a PK modulator and/or a cell permeation peptide.

[0237] Additional carbohydrate conjugates (and linkers) suitable for use in the present invention include those described in PCT Publication Nos. WO 2014/179620 and WO 2014/179627, the entire contents of each of which are incorporated herein by reference.

### D. Linkers

[0238] In some embodiments, the conjugate or ligand described herein can be attached to an antisense polynucleotide agent with various linkers that can be cleavable or non-cleavable.

[0239] The term “linker” or “linking group” means an organic moiety that connects two parts of a compound, e.g., covalently attaches two parts of a compound. Linkers typically comprise a direct bond or an atom such as oxygen or sulfur, a unit such as NR8, C(O), C(O)NH, SO, SO₂, SO₂NH or a chain of atoms, such as, but not limited to, substituted or unsubstituted alkyl, substituted or unsubstituted alkenyl, substituted or unsubstituted alkynyl, arylalkyl, arylalkenyl, arylalkynyl, heteroarylalkyl, heteroarylalkenyl, heteroarylalkynyl, heterocyclylalkyl, heterocyclylalkenyl, heterocyclylalkynyl, aryl, heteroaryl, heterocyclyl, cycloalkyl, cycloalkenyl, alkylarylalkyl, alkylarylalkenyl, alkylarylalkynyl, alkenylarylalkyl, alkenylarylalkenyl, alkenylarylalkynyl, alkynylarylalkyl, alkynylarylalkenyl, alkynylarylalkynyl, alkylheteroarylalkyl, alkylheteroarylalkenyl, alkylheteroarylalkynyl, alkenylheteroarylalkyl, alkenylheteroarylalkenyl, alkenylheteroarylalkynyl, alkynylheteroarylalkyl, alkynylheteroarylalkenyl, alkynylheteroarylalkynyl, alkylheterocyclylalkyl, alkylheterocyclylalkenyl, alkylhererocyclylalkynyl, alkenylheterocyclylalkyl, alkenylheterocyclylalkenyl, alkenylheterocyclylalkynyl, alkynylheterocyclylalkyl, alkynylheterocyclylalkenyl, alkynylheterocyclylalkynyl, alkylaryl, alkenylaryl, alkynylaryl, alkylheteroaryl, alkenylheteroaryl, alkynylhereroaryl, which one or more methylenes can be interrupted or terminated by O, S, S(O), SO₂, N(R8), C(O), substituted or unsubstituted aryl, substituted or unsubstituted heteroaryl, substituted or unsubstituted heterocyclic; where R8 is hydrogen, acyl, aliphatic or substituted aliphatic. In one embodiment, the linker is between about 1-24 atoms, 2-24, 3-24, 4-24, 5-24, 6-24, 6-18, 7-18, 8-18 atoms, 7-17, 8-17, 6-16, 7-16, or 8-16 atoms.

[0240] A cleavable linking group is one which is sufficiently stable outside the cell, but which upon entry into a target cell is cleaved to release the two parts the linker is holding together. In a preferred embodiment, the cleavable linking group is cleaved at least about 10 times, 20, times, 30 times, 40 times, 50 times, 60 times, 70 times, 80 times, 90 times or more, or at least about 100 times faster in a target cell or under a first reference condition (which can, e.g., be selected to mimic or represent intracellular conditions) than in the blood of a subject, or under a second reference condition (which can, e.g., be selected to mimic or represent conditions found in the blood or serum).

[0241] Cleavable linking groups are susceptible to cleavage agents, e.g., pH, redox potential or the presence of degradative molecules. Generally, cleavage agents are more prevalent or found at higher levels or activities inside cells than in serum or blood. Examples of such degradative agents include: redox agents which are selected for particular substrates or which have no substrate specificity, including, e.g., oxidative or reductive enzymes or reductive agents such as mercaptans, present in cells, that can degrade a redox cleavable linking group by reduction; esterases; endosomes or agents that can create an acidic environment, e.g., those that result in a pH of five or lower; enzymes that can hydrolyze or degrade an acid cleavable linking group by acting as a general acid, peptidases (which can be substrate specific), and phosphatases.

[0242] A cleavable linkage group, such as a disulfide bond can be susceptible to pH. The pH of human serum is 7.4, while the average intracellular pH is slightly lower, ranging from about 7.1-7.3. Endosomes have a more acidic pH, in the range of 5.5-6.0, and lysosomes have an even more acidic pH at around 5.0. Some linkers will have a cleavable linking group that is cleaved at a preferred pH, thereby releasing a cationic lipid from the ligand inside the cell, or into the desired compartment of the cell.

[0243] A linker can include a cleavable linking group that is cleavable by a particular enzyme. The type of cleavable linking group incorporated into a linker can depend on the cell to be targeted. For example, a liver-targeting ligand can be linked to a cationic lipid through a linker that includes an ester group. Liver cells are rich in esterases, and therefore the linker will be cleaved more efficiently in liver cells than in cell types that are not esterase-rich. Other cell-types rich in esterases include cells of the lung, renal cortex, and testis.

[0244] Linkers that contain peptide bonds can be used when targeting cell types rich in peptidases, such as liver cells and synoviocytes.

[0245] In general, the suitability of a candidate cleavable linking group can be evaluated by testing the ability of a degradative agent (or condition) to cleave the candidate linking group. It will also be desirable to also test the candidate cleavable linking group for the ability to resist cleavage in the blood or when in contact with other non-target tissue. Thus, one can determine the relative susceptibility to cleavage between a first and a second condition, where the first is selected to be indicative of cleavage in a target cell and the second is selected to be indicative of cleavage in other tissues or biological fluids, e.g., blood or serum. The evaluations can be carried out in cell free systems, in cells, in cell culture, in organ or tissue culture, or in whole animals. It can be useful to make initial evaluations in cell-free or culture conditions and to confirm by further evaluations in whole animals. In preferred embodiments, useful candidate compounds are cleaved at least about 2, 4, 10, 20, 30, 40, 50, 60, 70, 80, 90, or about 100 times faster in the cell (or under in vitro conditions selected to mimic intracellular conditions) as compared to blood or serum (or under in vitro conditions selected to mimic extracellular conditions).

### I. Redox Cleavable Linking Groups

[0246] In one embodiment, a cleavable linking group is a redox cleavable linking group that is cleaved upon reduction or oxidation. An example of reductively cleavable linking group is a disulphide linking group (-S-S-). To determine if a candidate cleavable linking group is a suitable “reductively cleavable linking group,” or for example is suitable for use with a particular antisense polynucleotide agent moiety and particular targeting agent one can look to methods described herein. For example, a candidate can be evaluated by incubation with dithiothreitol (DTT), or other reducing agent using reagents know in the art, which mimic the rate of cleavage which would be observed in a cell, e.g., a target cell. The candidates can also be evaluated under conditions which are selected to mimic blood or serum conditions. In one, candidate compounds are cleaved by at most about 10% in the blood. In other embodiments, useful candidate compounds are degraded at least about 2, 4, 10, 20, 30, 40, 50, 60, 70, 80, 90, or about 100 times faster in the cell (or under in vitro conditions selected to mimic intracellular conditions) as compared to blood (or under in vitro conditions selected to mimic extracellular conditions). The rate of cleavage of candidate compounds can be determined using standard enzyme kinetics assays under conditions chosen to mimic intracellular media and compared to conditions chosen to mimic extracellular media.

### II. Phosphate-Based Cleavable Linking Groups

[0247] In another embodiment, a cleavable linker comprises a phosphate-based cleavable linking group. A phosphate-based cleavable linking group is cleaved by agents that degrade or hydrolyze the phosphate group. An example of an agent that cleaves phosphate groups in cells are enzymes such as phosphatases in cells. Examples of phosphate-based linking groups are —O—P(O)(ORk)—O—, —O—P(S)(ORk)—O—, —O—P(S)(SRk)—O—, —S—P(O)(ORk)—O—, —OP(O)(ORk)—S—, —S—P(O)(ORk)—S—, —O—P(S)(ORk)—S—, —S—P(S)(ORk)—O—, —O—P(O)(Rk)—O—, —OP(S)(Rk)—O—, —S—P(O)(Rk)—O—, —S—P(S)(Rk)—O—, —S—P(O)(Rk)—S—, —O—P(S)(Rk)—S—. Preferred embodiments are —O—P(O)(OH)—O—, —O—P(S)(OH)—O—, —O—P(S)(SH)—O—, —S—P(O)(OH)—O—, —OP(O)(OH)—S—, —S—P(O)(OH)—S—, —O—P(S)(OH)—S—, —S—P(S)(OH)—O—, —O—P(O)(H)—O—, —OP(S)(H)—O—, —S—P(O)(H)—O, —S—P(S)(H)—O—, —S—P(O)(H)—S—, —O—P(S)(H)—S—. A preferred embodiment is —O—P(O)(OH)—O—. These candidates can be evaluated using methods analogous to those described above.

### III. Acid Cleavable Linking Groups

[0248] In another embodiment, a cleavable linker comprises an acid cleavable linking group. An acid cleavable linking group is a linking group that is cleaved under acidic conditions. In preferred embodiments acid cleavable linking groups are cleaved in an acidic environment with a pH of about 6.5 or lower (e.g., about 6.0, 5.75, 5.5, 5.25, 5.0, or lower), or by agents such as enzymes that can act as a general acid. In a cell, specific low pH organelles, such as endosomes and lysosomes can provide a cleaving environment for acid cleavable linking groups. Examples of acid cleavable linking groups include but are not limited to hydrazones, esters, and esters of amino acids. Acid cleavable groups can have the general formula —C═NN—, C(O)O, or —OC(O). A preferred embodiment is when the carbon attached to the oxygen of the ester (the alkoxy group) is an aryl group, substituted alkyl group, or tertiary alkyl group such as dimethyl pentyl or t-butyl. These candidates can be evaluated using methods analogous to those described above.

### Iv. Ester-Based Linking Groups

[0249] In another embodiment, a cleavable linker comprises an ester-based cleavable linking group. An ester-based cleavable linking group is cleaved by enzymes such as esterases and amidases in cells. Examples of ester-based cleavable linking groups include but are not limited to esters of alkylene, alkenylene and alkynylene groups. Ester cleavable linking groups have the general formula —C(O)O—, or —OC(O)—. These candidates can be evaluated using methods analogous to those described above.

### V. Peptide-Based Cleaving Groups

[0250] In yet another embodiment, a cleavable linker comprises a peptide-based cleavable linking group. A peptide-based cleavable linking group is cleaved by enzymes such as peptidases and proteases in cells. Peptide-based cleavable linking groups are peptide bonds formed between amino acids to yield oligopeptides (e.g., dipeptides, tripeptides etc.) and polypeptides. Peptide-based cleavable groups do not include the amide group (—C(O)NH—). The amide group can be formed between any alkylene, alkenylene or alkynelene. A peptide bond is a special type of amide bond formed between amino acids to yield peptides and proteins. The peptide based cleavage group is generally limited to the peptide bond (i.e., the amide bond) formed between amino acids yielding peptides and proteins and does not include the entire amide functional group. Peptide-based cleavable linking groups have the general formula — NHCHRAC(O)NHCHRBC(O)—, where RA and RB are the R groups of the two adjacent amino acids. These candidates can be evaluated using methods analogous to those described above.

[0251] In one embodiment, an antisense polynucleotide agent of the invention is conjugated to a carbohydrate through a linker. Non-limiting examples of antisense polynucleotide agent carbohydrate conjugates with linkers of the compositions and methods of the invention include, but are not limited to,

[chemical structure]

[chemical structure]

[chemical structure]

[chemical structure]

[chemical structure]

[chemical structure]

[chemical structure]

and [chemical structure] when one of X or Y is an oligonucleotide, the other is a hydrogen.

[0252] In certain embodiments of the compositions and methods of the invention, a ligand is one or more “GalNAc” (N-acetylgalactosamine) derivatives attached through a bivalent or trivalent branched linker.

[0253] In one embodiment, a antisense polynucleotide agent of the invention is conjugated to a bivalent or trivalent branched linker selected from the group of structures shown in any of formula (XXXII) - (XXXV):

[chemical structure]

[chemical structure]

[chemical structure]

[chemical structure]

wherein:
[0254] q2A, q2B, q3A, q3B, q4A, q4B, q5A, q5B and q5C represent independently for each occurrence 0-20 and wherein the repeating unit can be the same or different;
[0255] P^{2A}, P^{2B}, P^{3A,} P^{3B}, P^{4A}, P^{4B}, P^{5A}, P^{5B}, P^{5C}, T^{2A}, T^{2B}, T^{3A}, T^{3B}, T^{4A}, T^{4B}, T^{4A}, T^{5B}, T^{5C} are each independently for each occurrence absent, CO, NH, O, S, OC(O), NHC(O), CH₂, CH₂NH or CH₂O;
[0256] Q^{2A}, Q^{2B}, Q^{3A}, Q^{3B}, Q^{4A}, Q^{4B}, Q^{5A}, Q^{5B}, Q^{5C} are independently for each occurrence absent, alkylene, substituted alkylene wherin one or more methylenes can be interrupted or terminated by one or more of O, S, S(O), SO₂, N(R^{N}), C(R′)=C(R″), C═C or C(O);
[0257] R^{2A}, R^{2B}, R^{3A}, R^{3B}, R^{4A}, R^{4B}, R^{5A}, R^{5B}, R^{5c} are each independently for each occurrence absent, NH, O, S, CH₂, C(O)O, C(O)NH, NHCH(R^{a})C(O), -C(O)-CH(R^{a})-NH-, CO, CH═N

[chemical structure]

[chemical structure]

[chemical structure]

[chemical structure]

[chemical structure]

or heterocyclyl;
[0258] L^{2A}, L^{2B}, L^{3A}, L^{3B}, L^{4A}, L^{4B}, L^{5A}, L^{5B} and L^{5c} represent the ligand; i.e. each independently for each occurrence a monosaccharide (such as GalNAc), disaccharide, trisaccharide, tetrasaccharide, oligosaccharide, or polysaccharide; andR^{a} is H or amino acid side chain. Trivalent conjugating GalNAc derivatives are particularly useful for use with antisense polynucleotide agents for inhibiting the expression of a target gene, such as those of formula (XXXVI):

[chemical structure]

wherein L^{5A}, L^{5B} and L^{5c} represent a monosaccharide, such as GalNAc derivative.

[0259] Examples of suitable bivalent and trivalent branched linker groups conjugating GalNAc derivatives include, but are not limited to, the structures recited above as formulas II, VII, XI, X, and XIII.

[0260] Representative U.S. patents that teach the preparation of RNA conjugates include, but are not limited to, U.S. Pat. Nos. 4,828,979; 4,948,882; 5,218,105; 5,525,465; 5,541,313; 5,545,730; 5,552,538; 5,578,717, 5,580,731; 5,591,584; 5,109,124; 5,118,802; 5,138,045; 5,414,077; 5,486,603; 5,512,439; 5,578,718; 5,608,046; 4,587,044; 4,605,735; 4,667,025; 4,762,779; 4,789,737; 4,824,941; 4,835,263; 4,876,335; 4,904,582; 4,958,013; 5,082,830; 5,112,963; 5,214,136; 5,082,830; 5,112,963; 5,214,136; 5,245,022; 5,254,469; 5,258,506; 5,262,536; 5,272,250; 5,292,873; 5,317,098; 5,371,241, 5,391,723; 5,416,203, 5,451,463; 5,510,475; 5,512,667; 5,514,785; 5,565,552; 5,567,810; 5,574,142; 5,585,481; 5,587,371; 5,595,726; 5,597,696; 5,599,923; 5,599,928 and 5,688,941; 6,294,664; 6,320,017; 6,576,752; 6,783,931; 6,900,297; 7,037,646; 8,106,022, the entire contents of each of which are hereby incorporated herein by reference.

[0261] It is not necessary for all positions in a given compound to be uniformly modified, and in fact more than one of the aforementioned modifications can be incorporated in a single compound or even at a single nucleoside within an antisense polynucleotide agent. The present invention also includes antisense polynucleotide agents that are chimeric compounds.

[0262] “Chimeric” antisense polynucleotide agents or “chimeras,” in the context of this invention, are antisense polynucleotide agent compounds, which contain two or more chemically distinct regions, each made up of at least one monomer unit, i.e., a nucleotide in the case of an antisense polynucleotide agent. These antisense polynucleotide agents typically contain at least one region wherein the RNA is modified so as to confer upon the antisense polynucleotide agent increased resistance to nuclease degradation, increased cellular uptake, and/or increased binding affinity for the target nucleic acid. An additional region of the antisense polynucleotide agent can serve as a substrate for enzymes capable of cleaving RNA:DNA or RNA:RNA hybrids. By way of example, RNase H is a cellular endonuclease which cleaves the RNA strand of an RNA:DNA duplex. Activation of RNase H, therefore, results in cleavage of the RNA target, thereby greatly enhancing the efficiency of antisense polynucleotide agent inhibition of gene expression. Consequently, comparable results can often be obtained with shorter antisense polynucleotide agents when chimeric antisense polynucleotide agents are used, compared to phosphorothioate deoxy antisense polynucleotide agents hybridizing to the same target region. Cleavage of the RNA target can be routinely detected by gel electrophoresis and, if necessary, associated nucleic acid hybridization techniques known in the art.

[0263] In certain instances, the nucleotide of an antisense polynucleotide agent can be modified by a non-ligand group. A number of non-ligand molecules have been conjugated to antisense polynucleotide agents in order to enhance the activity, cellular distribution or cellular uptake of the antisense polynucleotide agent, and procedures for performing such conjugations are available in the scientific literature. Such non-ligand moieties have included lipid moieties, such as cholesterol (Kubo, T. et al., Biochem. Biophys. Res. Comm., 2007, 365(1):54-61; Letsinger et al., Proc. Natl. Acad. Sci. USA, 1989, 86:6553), cholic acid (Manoharan et al., Bioorg. Med. Chem. Lett., 1994, 4:1053), a thioether, e.g., hexyl-S-tritylthiol (Manoharan et al., Ann. N.Y. Acad. Sci., 1992, 660:306; Manoharan et al., Bioorg. Med. Chem. Let., 1993, 3:2765), a thiocholesterol (Oberhauser et al., Nucl. Acids Res., 1992, 20:533), an aliphatic chain, e.g., dodecandiol or undecyl residues (Saison-Behmoaras et al., EMBO J., 1991, 10:111; Kabanov et al., FEBS Lett., 1990, 259:327; Svinarchuk et al., Biochimie, 1993, 75:49), a phospholipid, e.g., di-hexadecyl-rac-glycerol or triethylammonium 1,2-di-O-hexadecyl-rac-glycero-3-H-phosphonate (Manoharan et al., Tetrahedron Lett., 1995, 36:3651; Shea et al., Nucl. Acids Res., 1990, 18:3777), a polyamine or a polyethylene glycol chain (Manoharan et al., Nucleosides & Nucleotides, 1995, 14:969), or adamantane acetic acid (Manoharan et al., Tetrahedron Lett., 1995, 36:3651), a palmityl moiety (Mishra et al., Biochim. Biophys. Acta, 1995, 1264:229), or an octadecylamine or hexylamino-carbonyl-oxycholesterol moiety (Crooke et al., J. Pharmacol. Exp. Ther., 1996, 277:923). Representative United States patents that teach the preparation of such RNA conjugates have been listed above. Typical conjugation protocols involve the synthesis of an RNAs bearing an aminolinker at one or more positions of the sequence. The amino group is then reacted with the molecule being conjugated using appropriate coupling or activating reagents. The conjugation reaction can be performed either with the RNA still bound to the solid support or following cleavage of the RNA, in solution phase. Purification of the RNA conjugate by HPLC typically affords the pure conjugate.

### V. Delivery of an Antisense Polynucleotide Agent of the Invention

[0264] The delivery of an antisense polynucleotide agent of the invention to a cell e.g., a cell within a subject, such as a human subject (e.g., a subject in need thereof, such as a subject having an AGT-associated disease) can be achieved in a number of different ways. For example, delivery may be performed by contacting a cell with an antisense polynucleotide agent of the invention either in vitro or in vivo. In vivo delivery may also be performed directly by administering a composition comprising an antisense polynucleotide agent to a subject.

[0265] In general, any method of delivering a nucleic acid molecule (in vitro or in vivo) can be adapted for use with an antisense polynucleotide agent of the invention (see e.g., Akhtar S. and Julian RL. (1992) Trends Cell. Biol. 2(5):139-144 and WO94/02595, which are incorporated herein by reference in their entireties). For in vivo delivery, factors to consider in order to deliver an antisense polynucleotide agent include, for example, biological stability of the delivered molecule, prevention of non-specific effects, and accumulation of the delivered molecule in the target tissue. The non-specific effects of an antisense polynucleotide agent can be minimized by local administration, for example, by direct injection or implantation into a tissue or topically administering the preparation. Local administration to a treatment site maximizes local concentration of the agent, limits the exposure of the agent to systemic tissues that can otherwise be harmed by the agent or that can degrade the agent, and permits a lower total dose of the antisense polynucleotide agent to be administered. Several studies have shown successful knockdown of gene products when an antisense polynucleotide agent is administered locally. For example, intraocular delivery of a VEGF antisense polynucleotide agent by intravitreal injection in cynomolgus monkeys (Tolentino, MJ., et al (2004) Retina 24:132-138) and subretinal injections in mice (Reich, SJ., et al (2003) Mol. Vis. 9:210-216) were both shown to prevent neovascularization in an experimental model of age-related macular degeneration. In addition, direct intratumoral injection of a antisense polynucleotide agent in mice reduces tumor volume (Pille, J., et al (2005) Mol. Ther.11:267-274) and can prolong survival of tumor-bearing mice (Kim, WJ., et al (2006) Mol. Ther. 14:343-350; Li, S., et al (2007) Mol. Ther. 15:515-523). RNA interference has also shown success with local delivery to the CNS by direct injection (Dorn, G., et al. (2004) Nucleic Acids 32:e49; Tan, PH., et al (2005) Gene Ther. 12:59-66; Makimura, H., et al (2002) BMC Neurosci. 3:18; Shishkina, GT., et al (2004) Neuroscience 129:521-528; Thakker, ER., et al (2004) Proc. Natl. Acad. Sci. U.S.A. 101:17270-17275; Akaneya,Y., et al (2005) J. Neurophysiol. 93:594-602) and to the lungs by intranasal administration (Howard, KA., et al (2006) Mol. Ther. 14:476-484; Zhang, X., et al (2004) J. Biol. Chem. 279:10677-10684; Bitko, V., et al (2005) Nat. Med. 11:50-55). For administering an antisense polynucleotide agent systemically for the treatment of a disease, the agent can be modified or alternatively delivered using a drug delivery system; both methods act to prevent the rapid degradation of the antisense polynucleotide agent by endo- and exo-nucleases in vivo. Modification of the agent or the pharmaceutical carrier can also permit targeting of the antisense polynucleotide agent composition to the target tissue and avoid undesirable off-target effects. Antisense polynucleotide agent can be modified by chemical conjugation to lipophilic groups such as cholesterol to enhance cellular uptake and prevent degradation. In an alternative embodiment, the antisense polynucleotide agent can be delivered using drug delivery systems such as a nanoparticle, a dendrimer, a polymer, liposomes, or a cationic delivery system. Positively charged cationic delivery systems facilitate binding of an antisense polynucleotide agent molecule (negatively charged) and also enhance interactions at the negatively charged cell membrane to permit efficient uptake of an antisense polynucleotide agent by the cell. Cationic lipids, dendrimers, or polymers can either be bound to an antisense polynucleotide agent, or induced to form a vesicle or micelle (see e.g., Kim SH., et al (2008) Journal of Controlled Release 129(2):107-116) that encases an antisense polynucleotide agent. The formation of vesicles or micelles further prevents degradation of the antisense polynucleotide agent when administered systemically. Methods for making and administering cationic- antisense polynucleotide agent complexes are well within the abilities of one skilled in the art (see e.g., Sorensen, DR., et al (2003) J. Mol. Biol 327:761-766; Verma, UN, et al (2003) Clin. Cancer Res. 9:1291-1300; Arnold, AS et al (2007) J. Hypertens. 25:197-205, which are incorporated herein by reference in their entirety). Some non-limiting examples of drug delivery systems useful for systemic delivery of antisense polynucleotide agents include DOTAP (Sorensen, DR., et al (2003), supra; Verma, UN., et al (2003), supra), Oligofectamine, “solid nucleic acid lipid particles” (Zimmermann, TS., et al (2006) Nature 441:111-114), cardiolipin (Chien, PY., et al (2005) Cancer Gene Ther. 12:321-328; Pal, A., et al (2005) Int J. Oncol. 26:1087-1091), polyethyleneimine (Bonnet ME., et al (2008) Pharm. Res. Aug 16 Epub ahead of print; Aigner, A. (2006) J. Biomed. Biotechnol. 71659), Arg-Gly-Asp (RGD) peptides (Liu, S. (2006) Mol. Pharm. 3:472-487), and polyamidoamines (Tomalia, DA., et al (2007) Biochem. Soc. Trans. 35:61-67; Yoo, H., et al (1999) Pharm. Res. 16:1799-1804). In some embodiments, an antisense polynucleotide agent forms a complex with cyclodextrin for systemic administration. Methods for administration and pharmaceutical compositions of antisense polynucleotide agents and cyclodextrins can be found in U.S. Pat. No. 7,427,605, which is herein incorporated by reference in its entirety.

### VI. Pharmaceutical Compositions of the Invention

[0266] The present invention also includes pharmaceutical compositions and formulations which include the antisense polynucleotide agents of the invention. In one embodiment, provided herein are pharmaceutical compositions containing an antisense polynucleotide agent, as described herein, and a pharmaceutically acceptable carrier.

[0267] The phrase “pharmaceutically acceptable” is employed herein to refer to those compounds, materials, compositions, and/or dosage forms which are, within the scope of sound medical judgment, suitable for use in contact with the tissues of human subjects and animal subjects without excessive toxicity, irritation, allergic response, or other problem or complication, commensurate with a reasonable benefit/risk ratio.

[0268] The phrase “pharmaceutically-acceptable carrier” as used herein means a pharmaceutically-acceptable material, composition or vehicle, such as a liquid or solid filler, diluent, excipient, manufacturing aid (e.g., lubricant, talc magnesium, calcium or zinc stearate, or steric acid), or solvent encapsulating material, involved in carrying or transporting the subject compound from one organ, or portion of the body, to another organ, or portion of the body. Each carrier must be “acceptable” in the sense of being compatible with the other ingredients of the formulation and not injurious to the subject being treated. Some examples of materials which can serve as pharmaceutically-acceptable carriers include: (1) sugars, such as lactose, glucose and sucrose; (2) starches, such as corn starch and potato starch; (3) cellulose, and its derivatives, such as sodium carboxymethyl cellulose, ethyl cellulose and cellulose acetate; (4) powdered tragacanth; (5) malt; (6) gelatin; (7) lubricating agents, such as magnesium state, sodium lauryl sulfate and talc; (8) excipients, such as cocoa butter and suppository waxes; (9) oils, such as peanut oil, cottonseed oil, safflower oil, sesame oil, olive oil, corn oil and soybean oil; (10) glycols, such as propylene glycol; (11) polyols, such as glycerin, sorbitol, mannitol and polyethylene glycol; (12) esters, such as ethyl oleate and ethyl laurate; (13) agar; (14) buffering agents, such as magnesium hydroxide and aluminum hydroxide; (15) alginic acid; (16) pyrogen-free water; (17) isotonic saline; (18) Ringer’s solution; (19) ethyl alcohol; (20) pH buffered solutions; (21) polyesters, polycarbonates and/or polyanhydrides; (22) bulking agents, such as polypeptides and amino acids (23) serum components, such as serum albumin, HDL and LDL; and (22) other non-toxic compatible substances employed in pharmaceutical formulations.

[0269] The pharmaceutical compositions containing the antisense polynucleotide agents are useful for treating a disease or disorder associated with the expression or activity of an AGT gene, e.g. an AGT-associated disease. Such pharmaceutical compositions are formulated based on the mode of delivery. One example is compositions that are formulated for systemic administration via parenteral delivery, e.g., by subcutaneous (SC) or intravenous (IV) delivery. Another example is compositions that are formulated for direct delivery into the brain parenchyma, e.g., by infusion into the brain, such as by continuous pump infusion. The pharmaceutical compositions of the invention may be administered in dosages sufficient to inhibit expression of an AGT gene. In general, a suitable dose of an antisense polynucleotide agent of the invention will be in the range of about 0.001 to about 200.0 milligrams per kilogram body weight of the recipient per day, generally in the range of about 1 to 50 mg per kilogram body weight per day. For example, the antisense polynucleotide agent can be administered at about 0.01 mg/kg, about 0.05 mg/kg, about 0.5 mg/kg, about 1 mg/kg, about 1.5 mg/kg, about 2 mg/kg, about 3 mg/kg, about 10 mg/kg, about 20 mg/kg, about 30 mg/kg, about 40 mg/kg, or about 50 mg/kg per single dose.

[0270] For example, the antisense polynucleotide agent may be administered at a dose of about 0.1, 0.2, 0.3, 0.4, 0.5, 0.6, 0.7, 0.8, 0.9, 1, 1.1, 1.2, 1.3, 1.4, 1.5, 1.6, 1.7, 1.8, 1.9, 2, 2.1, 2.2, 2.3, 2.4, 2.5, 2.6, 2.7, 2.8, 2.9, 3, 3.1, 3.2, 3.3, 3.4, 3.5, 3.6, 3.7, 3.8, 3.9, 4, 4.1, 4.2, 4.3, 4.4, 4.5, 4.6, 4.7, 4.8, 4.9, 5, 5.1, 5.2, 5.3, 5.4, 5.5, 5.6, 5.7, 5.8, 5.9, 6, 6.1, 6.2, 6.3, 6.4, 6.5, 6.6, 6.7, 6.8, 6.9, 7, 7.1, 7.2, 7.3, 7.4, 7.5, 7.6, 7.7, 7.8, 7.9, 8, 8.1, 8.2, 8.3, 8.4, 8.5, 8.6, 8.7, 8.8, 8.9, 9, 9.1, 9.2, 9.3, 9.4, 9.5, 9.6, 9.7, 9.8, 9.9, 10, 11, 12, 13, 14, 15, 16, 17, 18, 19, 20, 21, 2, 23, 24, 25, 26, 27, 28, 29, 30, 31, 32, 33, 34, 35, 36, 37, 38, 39, 40, 41, 42, 43, 44, 45, 46, 47, 48, 49, or about 50 mg/kg. Values and ranges intermediate to the recited values are also intended to be part of this invention.

[0271] In another embodiment, the antisense polynucleotide agent is administered at a dose of about 0.1 to about 50 mg/kg, about 0.25 to about 50 mg/kg, about 0.5 to about 50 mg/kg, about 0.75 to about 50 mg/kg, about 1 to about 50 mg/mg, about 1.5 to about 50 mg/kb, about 2 to about 50 mg/kg, about 2.5 to about 50 mg/kg, about 3 to about 50 mg/kg, about 3.5 to about 50 mg/kg, about 4 to about 50 mg/kg, about 4.5 to about 50 mg/kg, about 5 to about 50 mg/kg, about 7.5 to about 50 mg/kg, about 10 to about 50 mg/kg, about 15 to about 50 mg/kg, about 20 to about 50 mg/kg, about 20 to about 50 mg/kg, about 25 to about 50 mg/kg, about 25 to about 50 mg/kg, about 30 to about 50 mg/kg, about 35 to about 50 mg/kg, about 40 to about 50 mg/kg, about 45 to about 50 mg/kg, about 0.1 to about 45 mg/kg, about 0.25 to about 45 mg/kg, about 0.5 to about 45 mg/kg, about 0.75 to about 45 mg/kg, about 1 to about 45 mg/mg, about 1.5 to about 45 mg/kb, about 2 to about 45 mg/kg, about 2.5 to about 45 mg/kg, about 3 to about 45 mg/kg, about 3.5 to about 45 mg/kg, about 4 to about 45 mg/kg, about 4.5 to about 45 mg/kg, about 5 to about 45 mg/kg, about 7.5 to about 45 mg/kg, about 10 to about 45 mg/kg, about 15 to about 45 mg/kg, about 20 to about 45 mg/kg, about 20 to about 45 mg/kg, about 25 to about 45 mg/kg, about 25 to about 45 mg/kg, about 30 to about 45 mg/kg, about 35 to about 45 mg/kg, about 40 to about 45 mg/kg, about 0.1 to about 40 mg/kg, about 0.25 to about 40 mg/kg, about 0.5 to about 40 mg/kg, about 0.75 to about 40 mg/kg, about 1 to about 40 mg/mg, about 1.5 to about 40 mg/kb, about 2 to about 40 mg/kg, about 2.5 to about 40 mg/kg, about 3 to about 40 mg/kg, about 3.5 to about 40 mg/kg, about 4 to about 40 mg/kg, about 4.5 to about 40 mg/kg, about 5 to about 40 mg/kg, about 7.5 to about 40 mg/kg, about 10 to about 40 mg/kg, about 15 to about 40 mg/kg, about 20 to about 40 mg/kg, about 20 to about 40 mg/kg, about 25 to about 40 mg/kg, about 25 to about 40 mg/kg, about 30 to about 40 mg/kg, about 35 to about 40 mg/kg, about 0.1 to about 30 mg/kg, about 0.25 to about 30 mg/kg, about 0.5 to about 30 mg/kg, about 0.75 to about 30 mg/kg, about 1 to about 30 mg/mg, about 1.5 to about 30 mg/kb, about 2 to about 30 mg/kg, about 2.5 to about 30 mg/kg, about 3 to about 30 mg/kg, about 3.5 to about 30 mg/kg, about 4 to about 30 mg/kg, about 4.5 to about 30 mg/kg, about 5 to about 30 mg/kg, about 7.5 to about 30 mg/kg, about 10 to about 30 mg/kg, about 15 to about 30 mg/kg, about 20 to about 30 mg/kg, about 20 to about 30 mg/kg, about 25 to about 30 mg/kg, about 0.1 to about 20 mg/kg, about 0.25 to about 20 mg/kg, about 0.5 to about 20 mg/kg, about 0.75 to about 20 mg/kg, about 1 to about 20 mg/mg, about 1.5 to about 20 mg/kb, about 2 to about 20 mg/kg, about 2.5 to about 20 mg/kg, about 3 to about 20 mg/kg, about 3.5 to about 20 mg/kg, about 4 to about 20 mg/kg, about 4.5 to about 20 mg/kg, about 5 to about 20 mg/kg, about 7.5 to about 20 mg/kg, about 10 to about 20 mg/kg, or about 15 to about 20 mg/kg. Values and ranges intermediate to the recited values are also intended to be part of this invention.

[0272] For example, the antisense polynucleotide agent may be administered at a dose of about 0.01, 0.02, 0.03, 0.04, 0.05, 0.06, 0.07, 0.08, 0.09, 0.1, 0.2, 0.3, 0.4, 0.5, 0.6, 0.7, 0.8, 0.9, 1, 1.1, 1.2, 1.3, 1.4, 1.5, 1.6, 1.7, 1.8, 1.9, 2, 2.1, 2.2, 2.3, 2.4, 2.5, 2.6, 2.7, 2.8, 2.9, 3, 3.1, 3.2, 3.3, 3.4, 3.5, 3.6, 3.7, 3.8, 3.9, 4, 4.1, 4.2, 4.3, 4.4, 4.5, 4.6, 4.7, 4.8, 4.9, 5, 5.1, 5.2, 5.3, 5.4, 5.5, 5.6, 5.7, 5.8, 5.9, 6, 6.1, 6.2, 6.3, 6.4, 6.5, 6.6, 6.7, 6.8, 6.9, 7, 7.1, 7.2, 7.3, 7.4, 7.5, 7.6, 7.7, 7.8, 7.9, 8, 8.1, 8.2, 8.3, 8.4, 8.5, 8.6, 8.7, 8.8, 8.9, 9, 9.1, 9.2, 9.3, 9.4, 9.5, 9.6, 9.7, 9.8, 9.9, 10, 11, 12, 13, 14, 15, 16, 17, 18, 19, 20, 21, 2, 23, 24, 25, 26, 27, 28, 29, 30, 31, 32, 33, 34, 35, 36, 37, 38, 39, 40, 41, 42, 43, 44, 45, 46, 47, 48, 49, or about 50 mg/kg. Values and ranges intermediate to the recited values are also intended to be part of this invention.

[0273] In another embodiment, the antisense polynucleotide agent is administered at a dose of about 0.5 to about 50 mg/kg, about 0.75 to about 50 mg/kg, about 1 to about 50 mg/mg, about 1.5 to about 50 mg/kgb, about 2 to about 50 mg/kg, about 2.5 to about 50 mg/kg, about 3 to about 50 mg/kg, about 3.5 to about 50 mg/kg, about 4 to about 50 mg/kg, about 4.5 to about 50 mg/kg, about 5 to about 50 mg/kg, about 7.5 to about 50 mg/kg, about 10 to about 50 mg/kg, about 15 to about 50 mg/kg, about 20 to about 50 mg/kg, about 20 to about 50 mg/kg, about 25 to about 50 mg/kg, about 25 to about 50 mg/kg, about 30 to about 50 mg/kg, about 35 to about 50 mg/kg, about 40 to about 50 mg/kg, about 45 to about 50 mg/kg, about 0.5 to about 45 mg/kg, about 0.75 to about 45 mg/kg, about 1 to about 45 mg/mg, about 1.5 to about 45 mg/kb, about 2 to about 45 mg/kg, about 2.5 to about 45 mg/kg, about 3 to about 45 mg/kg, about 3.5 to about 45 mg/kg, about 4 to about 45 mg/kg, about 4.5 to about 45 mg/kg, about 5 to about 45 mg/kg, about 7.5 to about 45 mg/kg, about 10 to about 45 mg/kg, about 15 to about 45 mg/kg, about 20 to about 45 mg/kg, about 20 to about 45 mg/kg, about 25 to about 45 mg/kg, about 25 to about 45 mg/kg, about 30 to about 45 mg/kg, about 35 to about 45 mg/kg, about 40 to about 45 mg/kg, about 0.5 to about 40 mg/kg, about 0.75 to about 40 mg/kg, about 1 to about 40 mg/mg, about 1.5 to about 40 mg/kb, about 2 to about 40 mg/kg, about 2.5 to about 40 mg/kg, about 3 to about 40 mg/kg, about 3.5 to about 40 mg/kg, about 4 to about 40 mg/kg, about 4.5 to about 40 mg/kg, about 5 to about 40 mg/kg, about 7.5 to about 40 mg/kg, about 10 to about 40 mg/kg, about 15 to about 40 mg/kg, about 20 to about 40 mg/kg, about 20 to about 40 mg/kg, about 25 to about 40 mg/kg, about 25 to about 40 mg/kg, about 30 to about 40 mg/kg, about 35 to about 40 mg/kg, about 0.5 to about 30 mg/kg, about 0.75 to about 30 mg/kg, about 1 to about 30 mg/mg, about 1.5 to about 30 mg/kb, about 2 to about 30 mg/kg, about 2.5 to about 30 mg/kg, about 3 to about 30 mg/kg, about 3.5 to about 30 mg/kg, about 4 to about 30 mg/kg, about 4.5 to about 30 mg/kg, about 5 to about 30 mg/kg, about 7.5 to about 30 mg/kg, about 10 to about 30 mg/kg, about 15 to about 30 mg/kg, about 20 to about 30 mg/kg, about 20 to about 30 mg/kg, about 25 to about 30 mg/kg, about 0.5 to about 20 mg/kg, about 0.75 to about 20 mg/kg, about 1 to about 20 mg/mg, about 1.5 to about 20 mg/kb, about 2 to about 20 mg/kg, about 2.5 to about 20 mg/kg, about 3 to about 20 mg/kg, about 3.5 to about 20 mg/kg, about 4 to about 20 mg/kg, about 4.5 to about 20 mg/kg, about 5 to about 20 mg/kg, about 7.5 to about 20 mg/kg, about 10 to about 20 mg/kg, or about 15 to about 20 mg/kg. In one embodiment, the antisense polynucleotide agent is administered at a dose of about 10 mg/kg to about 30 mg/kg. Values and ranges intermediate to the recited values are also intended to be part of this invention.

[0274] For example, subjects can be administered, e.g., subcutaneously or intravenously, a single therapeutic amount of antisense polynucleotide agent, such as about 0.1, 0.125, 0.15, 0.175, 0.2, 0.225, 0.25, 0.275, 0.3, 0.325, 0.35, 0.375, 0.4, 0.425, 0.45, 0.475, 0.5, 0.525, 0.55, 0.575, 0.6, 0.625, 0.65, 0.675, 0.7, 0.725, 0.75, 0.775, 0.8, 0.825, 0.85, 0.875, 0.9, 0.925, 0.95, 0.975, 1, 1.1, 1.2, 1.3, 1.4, 1.5, 1.6, 1.7, 1.8, 1.9, 2, 2.1, 2.2, 2.3, 2.4, 2.5, 2.6, 2.7, 2.8, 2.9, 3, 3.1, 3.2, 3.3, 3.4, 3.5, 3.6, 3.7, 3.8, 3.9, 4, 4.1, 4.2, 4.3, 4.4, 4.5, 4.6, 4.7, 4.8, 4.9, 5, 5.1, 5.2, 5.3, 5.4, 5.5, 5.6, 5.7, 5.8, 5.9, 6, 6.1, 6.2, 6.3, 6.4, 6.5, 6.6, 6.7, 6.8, 6.9, 7, 7.1, 7.2, 7.3, 7.4, 7.5, 7.6, 7.7, 7.8, 7.9, 8, 8.1, 8.2, 8.3, 8.4, 8.5, 8.6, 8.7, 8.8, 8.9, 9, 9.1, 9.2, 9.3, 9.4, 9.5, 9.6, 9.7, 9.8, 9.9, 10, 10.5, 11, 11.5, 12, 12.5, 13, 13.5, 14, 14.5, 15, 15.5, 16, 16.5, 17, 17.5, 18, 18.5, 19, 19.5, 20, 20.5, 21, 21.5, 22, 22.5, 23, 23.5, 24, 24.5, 25, 25.5, 26, 26.5, 27, 27.5, 28, 28.5, 29, 29.5, 30, 31, 32, 33, 34, 34, 35, 36, 37, 38, 39, 40, 41, 42, 43, 44, 45, 46, 47, 48, 49, or about 50 mg/kg. Values and ranges intermediate to the recited values are also intended to be part of this invention.

[0275] In some embodiments, subjects are administered, e.g., subcutaneously or intravenously, multiple doses of a therapeutic amount of antisense polynucleotide agent, such as a dose about 0.1, 0.125, 0.15, 0.175, 0.2, 0.225, 0.25, 0.275, 0.3, 0.325, 0.35, 0.375, 0.4, 0.425, 0.45, 0.475, 0.5, 0.525, 0.55, 0.575, 0.6, 0.625, 0.65, 0.675, 0.7, 0.725, 0.75, 0.775, 0.8, 0.825, 0.85, 0.875, 0.9, 0.925, 0.95, 0.975, 1, 1.1, 1.2, 1.3, 1.4, 1.5, 1.6, 1.7, 1.8, 1.9, 2, 2.1, 2.2, 2.3, 2.4, 2.5, 2.6, 2.7, 2.8, 2.9, 3, 3.1, 3.2, 3.3, 3.4, 3.5, 3.6, 3.7, 3.8, 3.9, 4, 4.1, 4.2, 4.3, 4.4, 4.5, 4.6, 4.7, 4.8, 4.9, 5, 5.1, 5.2, 5.3, 5.4, 5.5, 5.6, 5.7, 5.8, 5.9, 6, 6.1, 6.2, 6.3, 6.4, 6.5, 6.6, 6.7, 6.8, 6.9, 7, 7.1, 7.2, 7.3, 7.4, 7.5, 7.6, 7.7, 7.8, 7.9, 8, 8.1, 8.2, 8.3, 8.4, 8.5, 8.6, 8.7, 8.8, 8.9, 9, 9.1, 9.2, 9.3, 9.4, 9.5, 9.6, 9.7, 9.8, 9.9, 10, 10.5, 11, 11.5, 12, 12.5, 13, 13.5, 14, 14.5, 15, 15.5, 16, 16.5, 17, 17.5, 18, 18.5, 19, 19.5, 20, 20.5, 21, 21.5, 22, 22.5, 23, 23.5, 24, 24.5, 25, 25.5, 26, 26.5, 27, 27.5, 28, 28.5, 29, 29.5, 30, 31, 32, 33, 34, 34, 35, 36, 37, 38, 39, 40, 41, 42, 43, 44, 45, 46, 47, 48, 49, or about 50 mg/kg. A multi-dose regimine may include administration of a therapeutic amount of antisense polynucleotide agent daily, such as for two days, three days, four days, five days, six days, seven days, or longer.

[0276] In other embodiments, subjects are administered, e.g., subcutaneously or intravenously, a repeat dose of a therapeutic amount of antisense polynucleotide agent, such as a dose about 0.1, 0.125, 0.15, 0.175, 0.2, 0.225, 0.25, 0.275, 0.3, 0.325, 0.35, 0.375, 0.4, 0.425, 0.45, 0.475, 0.5, 0.525, 0.55, 0.575, 0.6, 0.625, 0.65, 0.675, 0.7, 0.725, 0.75, 0.775, 0.8, 0.825, 0.85, 0.875, 0.9, 0.925, 0.95, 0.975, 1, 1.1, 1.2, 1.3, 1.4, 1.5, 1.6, 1.7, 1.8, 1.9, 2, 2.1, 2.2, 2.3, 2.4, 2.5, 2.6, 2.7, 2.8, 2.9, 3, 3.1, 3.2, 3.3, 3.4, 3.5, 3.6, 3.7, 3.8, 3.9, 4, 4.1, 4.2, 4.3, 4.4, 4.5, 4.6, 4.7, 4.8, 4.9, 5, 5.1, 5.2, 5.3, 5.4, 5.5, 5.6, 5.7, 5.8, 5.9, 6, 6.1, 6.2, 6.3, 6.4, 6.5, 6.6, 6.7, 6.8, 6.9, 7, 7.1, 7.2, 7.3, 7.4, 7.5, 7.6, 7.7, 7.8, 7.9, 8, 8.1, 8.2, 8.3, 8.4, 8.5, 8.6, 8.7, 8.8, 8.9, 9, 9.1, 9.2, 9.3, 9.4, 9.5, 9.6, 9.7, 9.8, 9.9, 10, 10.5, 11, 11.5, 12, 12.5, 13, 13.5, 14, 14.5, 15, 15.5, 16, 16.5, 17, 17.5, 18, 18.5, 19, 19.5, 20, 20.5, 21, 21.5, 22, 22.5, 23, 23.5, 24, 24.5, 25, 25.5, 26, 26.5, 27, 27.5, 28, 28.5, 29, 29.5, 30, 31, 32, 33, 34, 34, 35, 36, 37, 38, 39, 40, 41, 42, 43, 44, 45, 46, 47, 48, 49, or about 50 mg/kg. A repeat-dose regimine may include administration of a therapeutic amount of antisense polynucleotide agent on a regular basis, such as every other day, every third day, every fourth day, twice a week, once a week, every other week, or once a month.

[0277] The pharmaceutical composition can be administered by intravenous infusion over a period of time, such as over a 5, 6, 7, 8, 9, 10, 11, 12, 13, 14, 15, 16, 17, 18, 19, 20, and 21, 22, 23, 24, or about a 25 minute period. The administration may be repeated, for example, on a regular basis, such as weekly, biweekly (i.e., every two weeks) for one month, two months, three months, four months or longer. After an initial treatment regimen, the treatments can be administered on a less frequent basis. For example, after administration weekly or biweekly for three months, administration can be repeated once per month, for six months or a year or longer.

[0278] The pharmaceutical composition can be administered once daily, or the pharmaceutical composition can be administered as two, three, or more sub-doses at appropriate intervals throughout the day or even using continuous infusion or delivery through a controlled release formulation. In that case, the antisense polynucleotide agent contained in each sub-dose must be correspondingly smaller in order to achieve the total daily dosage. The dosage unit can also be compounded for delivery over several days, e.g., using a conventional sustained release formulation which provides sustained release of the antisense polynucleotide agent over a several day period. Sustained release formulations are well known in the art and are particularly useful for delivery of agents at a particular site, such as could be used with the agents of the present invention. In this embodiment, the dosage unit contains a corresponding multiple of the daily dose.

[0279] In other embodiments, a single dose of the pharmaceutical compositions can be long lasting, such that subsequent doses are administered at not more than 3, 4, or 5 day intervals, or at not more than 1, 2, 3, or 4 week intervals. In some embodiments of the invention, a single dose of the pharmaceutical compositions of the invention is administered once per week. In other embodiments of the invention, a single dose of the pharmaceutical compositions of the invention is administered bi-monthly.

[0280] The skilled artisan will appreciate that certain factors can influence the dosage and timing required to effectively treat a subject, including but not limited to the severity of the disease or disorder, previous treatments, the general health and/or age of the subject, and other diseases present. Moreover, treatment of a subject with a therapeutically effective amount of a composition can include a single treatment or a series of treatments. Estimates of effective dosages and in vivo half-lives for the individual antisense polynucleotide agents encompassed by the invention can be made using conventional methodologies or on the basis of in vivo testing using an appropriate animal model, as described elsewhere herein.

[0281] Advances in mouse genetics have generated a number of mouse models for the study of various human diseases, such as a disorder that would benefit from reduction in the expression of AGT. Such models can be used for in vivo testing of an antisense polynucleotide agent, as well as for determining a therapeutically effective dose. Suitable mouse models are known in the art and include, for example, transgenic female Sprague-Dawley rats harboring the complete genomic human AGT gene (e.g., [TGR(hAGT)L1623] (see, e.g., Bohlender J,, et al. (1996) Hypertension 27: 535-540 and Bohlender J,, et al. (2000) J Am Soc Nephrol 11: 2056-2061)) are surgically implemented with a device for measuring blood pressure by telemetry. Subsequent to recovery from the procedure, these rats are mated with transgenic male Sprague-Dawley rats harboring the entire genomic human REN gene (e.g., [TGR(hREN)L10J] (see, e.g., Bohlender J, et al. (1997) Hypertension 29: 428-434 and Bohlender J,, et al. (2000) J Am Soc Nephrol 11: 2056-2061)). A number of models for hypertension, both genetic and induced are well known in the art. Appropriate animal models to test knockdown of AGT expression are also provided herein.

[0282] The pharmaceutical compositions of the present invention can be administered in a number of ways depending upon whether local or systemic treatment is desired and upon the area to be treated. Administration can be topical (e.g., by a transdermal patch), pulmonary, e.g., by inhalation or insufflation of powders or aerosols, including by nebulizer; intratracheal, intranasal, epidermal and transdermal, oral or parenteral. Parenteral administration includes intravenous, intraarterial, subcutaneous, intraperitoneal or intramuscular injection or infusion; subdermal, e.g., via an implanted device; or intracranial, e.g., by intraparenchymal, intrathecal or intraventricular, administration.

[0283] The antisense polynucleotide agent can be delivered in a manner to target a particular tissue, such as the liver (e.g., the hepatocytes of the liver).

[0284] Pharmaceutical compositions and formulations for topical administration can include transdermal patches, ointments, lotions, creams, gels, drops, suppositories, sprays, liquids and powders. Conventional pharmaceutical carriers, aqueous, powder or oily bases, thickeners and the like can be necessary or desirable. Coated condoms, gloves and the like can also be useful. Suitable topical formulations include those in which the antisense polynucleotide agents featured in the invention are in admixture with a topical delivery agent such as lipids, liposomes, fatty acids, fatty acid esters, steroids, chelating agents and surfactants. Suitable lipids and liposomes include neutral (e.g., dioleoylphosphatidyl DOPE ethanolamine, dimyristoylphosphatidyl choline DMPC, distearolyphosphatidyl choline) negative (e.g., dimyristoylphosphatidyl glycerol DMPG) and cationic (e.g., dioleoyltetramethylaminopropyl DOTAP and dioleoylphosphatidyl ethanolamine DOTMA). Antisense polynucleotide agents featured in the invention can be encapsulated within liposomes or can form complexes thereto, in particular to cationic liposomes. Alternatively, antisense polynucleotide agents can be complexed to lipids, in particular to cationic lipids. Suitable fatty acids and esters include but are not limited to arachidonic acid, oleic acid, eicosanoic acid, lauric acid, caprylic acid, capric acid, myristic acid, palmitic acid, stearic acid, linoleic acid, linolenic acid, dicaprate, tricaprate, monoolein, dilaurin, glyceryl 1-monocaprate, 1-dodecylazacycloheptan-2-one, an acylcarnitine, an acylcholine, or a C₁₋₂₀ alkyl ester (e.g., isopropylmyristate IPM), monoglyceride, diglyceride or pharmaceutically acceptable salt thereof). Topical formulations are described in detail in U.S. Pat. No. 6,747,014, which is incorporated herein by reference.

### A. Antisense Polynucleotide Agent Formulations Comprising Membranous Molecular Assemblies

[0285] An antisense polynucleotide agent for use in the compositions and methods of the invention can be formulated for delivery in a membranous molecular assembly, e.g., a liposome or a micelle. As used herein, the term “liposome” refers to a vesicle composed of amphiphilic lipids arranged in at least one bilayer, e.g., one bilayer or a plurality of bilayers. Liposomes include unilamellar and multilamellar vesicles that have a membrane formed from a lipophilic material and an aqueous interior. The aqueous portion contains the antisense polynucleotide agent composition. The lipophilic material isolates the aqueous interior from an aqueous exterior, which typically does not include the antisense polynucleotide agent composition, although in some examples, it may. Liposomes are useful for the transfer and delivery of active ingredients to the site of action. Because the liposomal membrane is structurally similar to biological membranes, when liposomes are applied to a tissue, the liposomal bilayer fuses with bilayer of the cellular membranes. As the merging of the liposome and cell progresses, the internal aqueous contents that include the antisense polynucleotide agent are delivered into the cell where the antisense polynucleotide agent can specifically bind to a target RNA and can mediate antisense inhibition. In some cases the liposomes are also specifically targeted, e.g., to direct the antisense polynucleotide agent to particular cell types.

[0286] A liposome containing an antisense polynucleotide agent can be prepared by a variety of methods. In one example, the lipid component of a liposome is dissolved in a detergent so that micelles are formed with the lipid component. For example, the lipid component can be an amphipathic cationic lipid or lipid conjugate. The detergent can have a high critical micelle concentration and may be nonionic. Exemplary detergents include cholate, CHAPS, octylglucoside, deoxycholate, and lauroyl sarcosine. The antisense polynucleotide agent preparation is then added to the micelles that include the lipid component. The cationic groups on the lipid interact with the antisense polynucleotide agent and condense around the antisense polynucleotide agent to form a liposome. After condensation, the detergent is removed, e.g., by dialysis, to yield a liposomal preparation of antisense polynucleotide agent.

[0287] If necessary a carrier compound that assists in condensation can be added during the condensation reaction, e.g., by controlled addition. For example, the carrier compound can be a polymer other than a nucleic acid (e.g., spermine or spermidine). pH can also be adjusted to favor condensation.

[0288] Methods for producing stable polynucleotide delivery vehicles, which incorporate a polynucleotide/cationic lipid complex as structural components of the delivery vehicle, are further described in, e.g., WO 96/37194, the entire contents of which are incorporated herein by reference. Liposome formation can also include one or more aspects of exemplary methods described in Felgner, P. L. et al., Proc. Natl. Acad. Sci., USA 8:7413-7417, 1987; U.S. Pat. No. 4,897,355; U.S. Pat. No. 5,171,678; Bangham, et al. M. Mol. Biol. 23:238, 1965; Olson, et al. Biochim. Biophys. Acta 557:9, 1979; Szoka, et al. Proc. Natl. Acad. Sci. 75: 4194, 1978; Mayhew, et al. Biochim. Biophys. Acta 775:169, 1984; Kim, et al. Biochim. Biophys. Acta 728:339, 1983; and Fukunaga, et al. Endocrinol. 115:757, 1984. Commonly used techniques for preparing lipid aggregates of appropriate size for use as delivery vehicles include sonication and freeze-thaw plus extrusion (see, e.g., Mayer, et al. Biochim. Biophys. Acta 858:161, 1986). Microfluidization can be used when consistently small (50 to 200 nm) and relatively uniform aggregates are desired (Mayhew, et al. Biochim. Biophys. Acta 775:169, 1984). These methods are readily adapted to packaging antisense polynucleotide agent preparations into liposomes.

[0289] Liposomes fall into two broad classes. Cationic liposomes are positively charged liposomes which interact with the negatively charged nucleic acid molecules to form a stable complex. The positively charged nucleic acid/liposome complex binds to the negatively charged cell surface and is internalized in an endosome. Due to the acidic pH within the77 endosome, the liposomes are ruptured, releasing their contents into the cell cytoplasm (Wang et al., Biochem. Biophys. Res. Commun., 1987, 147, 980-985).

[0290] Liposomes which are pH-sensitive or negatively-charged, entrap nucleic acids rather than complex with it. Since both the nucleic acid and the lipid are similarly charged, repulsion rather than complex formation occurs. Nevertheless, some nucleic acid is entrapped within the aqueous interior of these liposomes. pH-sensitive liposomes have been used to deliver nucleic acids encoding the thymidine kinase gene to cell monolayers in culture. Expression of the exogenous gene was detected in the target cells (Zhou et al., Journal of Controlled Release, 1992, 19, 269-274).

[0291] One major type of liposomal composition includes phospholipids other than naturally-derived phosphatidylcholine. Neutral liposome compositions, for example, can be formed from dimyristoyl phosphatidylcholine (DMPC) or dipalmitoyl phosphatidylcholine (DPPC). Anionic liposome compositions generally are formed from dimyristoyl phosphatidylglycerol, while anionic fusogenic liposomes are formed primarily from dioleoyl phosphatidylethanolamine (DOPE). Another type of liposomal composition is formed from phosphatidylcholine (PC) such as, for example, soybean PC, and egg PC. Another type is formed from mixtures of phospholipid and/or phosphatidylcholine and/or cholesterol.

[0292] Examples of other methods to introduce liposomes into cells in vitro and in vivo include U.S. Pat. No. 5,283,185; U.S. Pat. No. 5,171,678; WO 94/00569; WO 93/24640; WO 91/16024; Felgner, J. Biol. Chem. 269:2550, 1994; Nabel, Proc. Natl. Acad. Sci. 90:11307, 1993; Nabel, Human Gene Ther. 3:649, 1992; Gershon, Biochem. 32:7143, 1993; and Strauss EMBO J. 11:417, 1992.

[0293] Non-ionic liposomal systems have also been examined to determine their utility in the delivery of drugs to the skin, in particular systems comprising non-ionic surfactant and cholesterol. Non-ionic liposomal formulations comprising Novasome™ I (glyceryl dilaurate/cholesterol/polyoxyethylene-10-stearyl ether) and Novasome™ II (glyceryl distearate/cholesterol/polyoxyethylene-10-stearyl ether) were used to deliver cyclosporin-A into the dermis of mouse skin. Results indicated that such non-ionic liposomal systems were effective in facilitating the deposition of cyclosporine A into different layers of the skin (Hu et al. S.T.P.Pharma. Sci., 1994, 4(6) 466).

[0294] Liposomes also include “sterically stabilized” liposomes, a term which, as used herein, refers to liposomes comprising one or more specialized lipids that, when incorporated into liposomes, result in enhanced circulation lifetimes relative to liposomes lacking such specialized lipids. Examples of sterically stabilized liposomes are those in which part of the vesicle-forming lipid portion of the liposome (A) comprises one or more glycolipids, such as monosialoganglioside G_{M1}, or (B) is derivatized with one or more hydrophilic polymers, such as a polyethylene glycol (PEG) moiety. While not wishing to be bound by any particular theory, it is thought in the art that, at least for sterically stabilized liposomes containing gangliosides, sphingomyelin, or PEG-derivatized lipids, the enhanced circulation half-life of these sterically stabilized liposomes derives from a reduced uptake into cells of the reticuloendothelial system (RES) (Allen et al., FEBS Letters, 1987, 223, 42; Wu et al., Cancer Research, 1993, 53, 3765).

[0295] Various liposomes comprising one or more glycolipids are known in the art. Papahadjopoulos et al. (Ann. N.Y. Acad. Sci., 1987, 507, 64) reported the ability of monosialoganglioside G_{M1}, galactocerebroside sulfate and phosphatidylinositol to improve blood half-lives of liposomes. These findings were expounded upon by Gabizon et al. (Proc. Natl. Acad. Sci. U.S.A., 1988, 85, 6949). U.S. Pat. No. 4,837,028 and WO 88/04924, both to Allen et al., disclose liposomes comprising (1) sphingomyelin and (2) the ganglioside G_{M1} or a galactocerebroside sulfate ester. U.S. Pat. No. 5,543,152 (Webb et al.) discloses liposomes comprising sphingomyelin. Liposomes comprising 1,2-sn-dimyristoylphosphatidylcholine are disclosed in WO 97/13499 (Lim et al).

[0296] In one embodiment, cationic liposomes are used. Cationic liposomes possess the advantage of being able to fuse to the cell membrane. Non-cationic liposomes, although not able to fuse as efficiently with the plasma membrane, are taken up by macrophages in vivo and can be used to deliver antisense polynucleotide agents to macrophages.

[0297] Further advantages of liposomes include: liposomes obtained from natural phospholipids are biocompatible and biodegradable; liposomes can incorporate a wide range of water and lipid soluble drugs; liposomes can protect encapsulated antisense polynucleotide agents in their internal compartments from metabolism and degradation (Rosoff, in “Pharmaceutical Dosage Forms,” Lieberman, Rieger and Banker (Eds.), 1988, volume 1, p. 245). Important considerations in the preparation of liposome formulations are the lipid surface charge, vesicle size and the aqueous volume of the liposomes.

[0298] A positively charged synthetic cationic lipid, N-[1-(2,3-dioleyloxy)propyl]-N,N,N-trimethylammonium chloride (DOTMA) can be used to form small liposomes that interact spontaneously with nucleic acid to form lipid-nucleic acid complexes which are capable of fusing with the negatively charged lipids of the cell membranes of tissue culture cells, resulting in delivery of Antisense polynucleotide agent (see, e.g., Felgner, P. L. et al., Proc. Natl. Acad. Sci., USA 8:7413-7417, 1987 and U.S. Pat. No. 4,897,355 for a description of DOTMA and its use with DNA).

[0299] A DOTMA analogue, 1,2-bis(oleoyloxy)-3-(trimethylammonia)propane (DOTAP) can be used in combination with a phospholipid to form DNA-complexing vesicles. Lipofectin™ Bethesda Research Laboratories, Gaithersburg, Md.) is an effective agent for the delivery of highly anionic nucleic acids into living tissue culture cells that comprise positively charged DOTMA liposomes which interact spontaneously with negatively charged polynucleotides to form complexes. When enough positively charged liposomes are used, the net charge on the resulting complexes is also positive. Positively charged complexes prepared in this way spontaneously attach to negatively charged cell surfaces, fuse with the plasma membrane, and efficiently deliver functional nucleic acids into, for example, tissue culture cells. Another commercially available cationic lipid, 1,2-bis(oleoyloxy)-3,3-(trimethylammonia)propane (“DOTAP”) (Boehringer Mannheim, Indianapolis, Indiana) differs from DOTMA in that the oleoyl moieties are linked by ester, rather than ether linkages.

[0300] Other reported cationic lipid compounds include those that have been conjugated to a variety of moieties including, for example, carboxyspermine which has been conjugated to one of two types of lipids and includes compounds such as 5-carboxyspermylglycine dioctaoleoylamide (“DOGS”) (Transfectam™, Promega, Madison, Wisconsin) and dipalmitoylphosphatidylethanolamine 5-carboxyspermyl-amide (“DPPES”) (see, e.g., U.S. Pat. No. 5,171,678).

[0301] Another cationic lipid conjugate includes derivatization of the lipid with cholesterol (“DC-Chol”) which has been formulated into liposomes in combination with DOPE (See, Gao, X. and Huang, L., Biochim. Biophys. Res. Commun. 179:280, 1991). Lipopolylysine, made by conjugating polylysine to DOPE, has been reported to be effective for transfection in the presence of serum (Zhou, X. et al., Biochim. Biophys. Acta 1065:8, 1991). For certain cell lines, these liposomes containing conjugated cationic lipids, are said to exhibit lower toxicity and provide more efficient transfection than the DOTMA-containing compositions. Other commercially available cationic lipid products include DMRIE and DMRIE-HP (Vical, La Jolla, California) and Lipofectamine (DOSPA) (Life Technology, Inc., Gaithersburg, Maryland). Other cationic lipids suitable for the delivery of oligonucleotides are described in WO 98/39359 and WO 96/37194.

[0302] Liposomal formulations are particularly suited for topical administration; liposomes present several advantages over other formulations. Such advantages include reduced side effects related to high systemic absorption of the administered drug, increased accumulation of the administered drug at the desired target, and the ability to administer an antisense polynucleotide agent into the skin. In some implementations, liposomes are used for delivering antisense polynucleotide agenst to epidermal cells and also to enhance the penetration of antisense polynucleotide agenst into dermal tissues, e.g., into skin. For example, the liposomes can be applied topically. Topical delivery of drugs formulated as liposomes to the skin has been documented (see, e.g., Weiner et al., Journal of Drug Targeting, 1992, vol. 2,405-410 and du Plessis et al., Antiviral Research, 18, 1992, 259-265; Mannino, R. J. and Fould-Fogerite, S., Biotechniques 6:682-690, 1988; Itani, T. et al. Gene 56:267-276. 1987; Nicolau, C. et al. Meth. Enz. 149:157-176, 1987; Straubinger, R. M. and Papahadjopoulos, D. Meth. Enz. 101:512-527, 1983; Wang, C. Y. and Huang, L., Proc. Natl. Acad. Sci. USA 84:7851-7855, 1987).

[0303] Non-ionic liposomal systems have also been examined to determine their utility in the delivery of drugs to the skin, in particular systems comprising non-ionic surfactant and cholesterol. Non-ionic liposomal formulations comprising Novasome I (glyceryl dilaurate/cholesterol/polyoxyethylene-10-stearyl ether) and Novasome II (glyceryl distearate/ cholesterol/polyoxyethylene-10-stearyl ether) were used to deliver a drug into the dermis of mouse skin. Such formulations with antisense polynucleotide agents are useful for treating a dermatological disorder.

[0304] Liposomes that include antisense polynucleotide agent can be made highly deformable. Such deformability can enable the liposomes to penetrate through pore that are smaller than the average radius of the liposome. For example, transfersomes are a type of deformable liposomes. Transferosomes can be made by adding surface edge activators, usually surfactants, to a standard liposomal composition. Transfersomes that include antisense polynucleotide agents can be delivered, for example, subcutaneously by infection in order to deliver antisense polynucleotide agents to keratinocytes in the skin. In order to cross intact mammalian skin, lipid vesicles must pass through a series of fine pores, each with a diameter less than 50 nm, under the influence of a suitable transdermal gradient. In addition, due to the lipid properties, these transferosomes can be self-optimizing (adaptive to the shape of pores, e.g., in the skin), self-repairing, and can frequently reach their targets without fragmenting, and often self-loading.

[0305] Other formulations amenable to the present invention are described in U.S. provisional application serial Nos. 61/018,616, filed Jan. 2, 2008; 61/018,611, filed Jan. 2, 2008; 61/039,748, filed Mar. 26, 2008; 61/047,087, filed Apr. 22, 2008 and 61/051,528, filed May 8, 2008. PCT application no PCT/US2007/080331, filed Oct. 3, 2007 also describes formulations that are amenable to the present invention.

[0306] Transfersomes are yet another type of liposomes, and are highly deformable lipid aggregates which are attractive candidates for drug delivery vehicles. Transfersomes can be described as lipid droplets which are so highly deformable that they are easily able to penetrate through pores which are smaller than the droplet. Transfersomes are adaptable to the environment in which they are used, e.g., they are self-optimizing (adaptive to the shape of pores in the skin), self-repairing, frequently reach their targets without fragmenting, and often self-loading. To make transfersomes it is possible to add surface edge-activators, usually surfactants, to a standard liposomal composition. Transfersomes have been used to deliver serum albumin to the skin. The transfersome-mediated delivery of serum albumin has been shown to be as effective as subcutaneous injection of a solution containing serum albumin.

[0307] Surfactants find wide application in formulations such as emulsions (including microemulsions) and liposomes. The most common way of classifying and ranking the properties of the many different types of surfactants, both natural and synthetic, is by the use of the hydrophile/lipophile balance (HLB). The nature of the hydrophilic group (also known as the “head”) provides the most useful means for categorizing the different surfactants used in formulations (Rieger, in “Pharmaceutical Dosage Forms”, Marcel Dekker, Inc., New York, N.Y., 1988, p. 285).

[0308] If the surfactant molecule is not ionized, it is classified as a nonionic surfactant. Nonionic surfactants find wide application in pharmaceutical and cosmetic products and are usable over a wide range of pH values. In general their HLB values range from 2 to about 18 depending on their structure. Nonionic surfactants include nonionic esters such as ethylene glycol esters, propylene glycol esters, glyceryl esters, polyglyceryl esters, sorbitan esters, sucrose esters, and ethoxylated esters. Nonionic alkanolamides and ethers such as fatty alcohol ethoxylates, propoxylated alcohols, and ethoxylated/propoxylated block polymers are also included in this class. The polyoxyethylene surfactants are the most popular members of the nonionic surfactant class.

[0309] If the surfactant molecule carries a negative charge when it is dissolved or dispersed in water, the surfactant is classified as anionic. Anionic surfactants include carboxylates such as soaps, acyl lactylates, acyl amides of amino acids, esters of sulfuric acid such as alkyl sulfates and ethoxylated alkyl sulfates, sulfonates such as alkyl benzene sulfonates, acyl isethionates, acyl taurates and sulfosuccinates, and phosphates. The most important members of the anionic surfactant class are the alkyl sulfates and the soaps.

[0310] If the surfactant molecule carries a positive charge when it is dissolved or dispersed in water, the surfactant is classified as cationic. Cationic surfactants include quaternary ammonium salts and ethoxylated amines. The quaternary ammonium salts are the most used members of this class.

[0311] If the surfactant molecule has the ability to carry either a positive or negative charge, the surfactant is classified as amphoteric. Amphoteric surfactants include acrylic acid derivatives, substituted alkylamides, N-alkylbetaines and phosphatides.

[0312] The use of surfactants in drug products, formulations and in emulsions has been reviewed (Rieger, in “Pharmaceutical Dosage Forms”, Marcel Dekker, Inc., New York, N.Y., 1988, p. 285).

[0313] The antisense polynucleotide agent for use in the compositions and methods of the invention can also be provided as micellar formulations. “Micelles” are defined herein as a particular type of molecular assembly in which amphipathic molecules are arranged in a spherical structure such that all the hydrophobic portions of the molecules are directed inward, leaving the hydrophilic portions in contact with the surrounding aqueous phase. The converse arrangement exists if the environment is hydrophobic.

[0314] A mixed micellar formulation suitable for delivery through transdermal membranes may be prepared by mixing an aqueous solution of the antisense polynucleotide agent composition, an alkali metal C₈ to C₂₂ alkyl sulphate, and a micelle forming compounds. Exemplary micelle forming compounds include lecithin, hyaluronic acid, pharmaceutically acceptable salts of hyaluronic acid, glycolic acid, lactic acid, chamomile extract, cucumber extract, oleic acid, linoleic acid, linolenic acid, monoolein, monooleates, monolaurates, borage oil, evening of primrose oil, menthol, trihydroxy oxo cholanyl glycine and pharmaceutically acceptable salts thereof, glycerin, polyglycerin, lysine, polylysine, triolein, polyoxyethylene ethers and analogues thereof, polidocanol alkyl ethers and analogues thereof, chenodeoxycholate, deoxycholate, and mixtures thereof. The micelle forming compounds may be added at the same time or after addition of the alkali metal alkyl sulphate. Mixed micelles will form with substantially any kind of mixing of the ingredients but vigorous mixing in order to provide smaller size micelles.

[0315] In one method a first micellar composition is prepared which contains the antisense polynucleotide agent composition and at least the alkali metal alkyl sulphate. The first micellar composition is then mixed with at least three micelle forming compounds to form a mixed micellar composition. In another method, the micellar composition is prepared by mixing the antisense polynucleotide agent composition, the alkali metal alkyl sulphate and at least one of the micelle forming compounds, followed by addition of the remaining micelle forming compounds, with vigorous mixing.

[0316] Phenol and/or m-cresol may be added to the mixed micellar composition to stabilize the formulation and protect against bacterial growth. Alternatively, phenol and/or m-cresol may be added with the micelle forming ingredients. An isotonic agent such as glycerin may also be added after formation of the mixed micellar composition.

[0317] For delivery of the micellar formulation as a spray, the formulation can be put into an aerosol dispenser and the dispenser is charged with a propellant. The propellant, which is under pressure, is in liquid form in the dispenser. The ratios of the ingredients are adjusted so that the aqueous and propellant phases become one, i.e., there is one phase. If there are two phases, it is necessary to shake the dispenser prior to dispensing a portion of the contents, e.g., through a metered valve. The dispensed dose of pharmaceutical agent is propelled from the metered valve in a fine spray.

[0318] Propellants may include hydrogen-containing chlorofluorocarbons, hydrogen-containing fluorocarbons, dimethyl ether and diethyl ether. In certain embodiments, HFA 134a (1,1,1,2 tetrafluoroethane) may be used.

[0319] The specific concentrations of the essential ingredients can be determined by relatively straightforward experimentation. For absorption through the oral cavities, it is often desirable to increase, e.g., at least double or triple, the dosage for through injection or administration through the gastrointestinal tract.

### B. Lipid Particles

[0320] Antisense polynucleotide agents of in the invention may be fully encapsulated in a lipid formulation, e.g., a LNP, or other nucleic acid-lipid particle.

[0321] As used herein, the term “LNP” refers to a stable nucleic acid-lipid particle comprising a lipid layer encapsulating a pharmaceutically active molecule. LNPs typically contain a cationic lipid, a non-cationic lipid, and a lipid that prevents aggregation of the particle (e.g., a PEG-lipid conjugate). LNPs are extremely useful for systemic applications, as they exhibit extended circulation lifetimes following intravenous (i.v.) injection and accumulate at distal sites (e.g., sites physically separated from the administration site). LNPs include “pSPLP,” which include an encapsulated condensing agent-nucleic acid complex as set forth in PCT Publication No. WO 00/03683. The particles of the present invention typically have a mean diameter of about 50 nm to about 150 nm, more typically about 60 nm to about 130 nm, more typically about 70 nm to about 110 nm, most typically about 70 nm to about 90 nm, and are substantially nontoxic. In addition, the nucleic acids when present in the nucleic acid- lipid particles of the present invention are resistant in aqueous solution to degradation with a nuclease. Nucleic acid-lipid particles and their method of preparation are disclosed in, e.g., U.S. Pat. Nos. 5,976,567; 5,981,501; 6,534,484; 6,586,410; 6,815,432; 6,858,225; 8,158,601; and 8,058,069; U.S. Publication No. 2010/0324120 and PCT Publication No. WO 96/40964.

[0322] In one embodiment, the lipid to drug ratio (mass/mass ratio) (e.g., lipid to antisense polynucleotide agent ratio) will be in the range of from about 1:1 to about 50:1, from about 1:1 to about 25:1, from about 3:1 to about 15:1, from about 4:1 to about 10:1, from about 5:1 to about 9:1, or about 6:1 to about 9:1. Ranges intermediate to the above recited ranges are also contemplated to be part of the invention.

[0323] The cationic lipid can be, for example, N,N-dioleyl-N,N-dimethylammonium chloride (DODAC), N,N-distearyl-N,N-dimethylammonium bromide (DDAB), N-(I -(2,3-dioleoyloxy)propyl)-N,N,N-trimethylammonium chloride (DOTAP), N-(I -(2,3-dioleyloxy)propyl)-N,N,N-trimethylammonium chloride (DOTMA), N,N-dimethyl-2,3-dioleyloxy)propylamine (DODMA), 1,2-DiLinoleyloxy-N,N-dimethylaminopropane (DLinDMA), 1,2-Dilinolenyloxy-N,N-dimethylaminopropane (DLenDMA), 1,2-Dilinoleylcarbamoyloxy-3-dimethylaminopropane (DLin-C-DAP), 1,2-Dilinoleyoxy-3-(dimethylamino)acetoxypropane (DLin-DAC), 1,2-Dilinoleyoxy-3-morpholinopropane (DLin-MA), 1,2-Dilinoleoyl-3-dimethylaminopropane (DLinDAP), 1,2-Dilinoleylthio-3-dimethylaminopropane (DLin-S-DMA), 1-Linoleoyl-2-linoleyloxy-3-dimethylaminopropane (DLin-2-DMAP), 1,2-Dilinoleyloxy-3-trimethylaminopropane chloride salt (DLin-TMA.Cl), 1,2-Dilinoleoyl-3-trimethylaminopropane chloride salt (DLin-TAP.Cl), 1,2-Dilinoleyloxy-3-(N-methylpiperazino)propane (DLin-MPZ), or 3-(N,N-Dilinoleylamino)-1,2-propanediol (DLinAP), 3-(N,N-Dioleylamino)-1,2-propanedio (DOAP), 1,2-Dilinoleyloxo-3-(2-N,N-dimethylamino)ethoxypropane (DLin-EG-DMA), 1,2-Dilinolenyloxy-N,N-dimethylaminopropane (DLinDMA), 2,2-Dilinoleyl-4-dimethylaminomethyl-[1,3]-dioxolane (DLin-K-DMA) or analogs thereof, (3aR,5s,6aS)-N,N-dimethyl-2,2-di((9Z,12Z)-octadeca-9,12-dienyl)tetrahydro-3aH-cyclopenta[d][1,3]dioxol-5-amine (ALN100), (6Z,9Z,28Z,31Z)-heptatriaconta-6,9,28,31-tetraen-19-yl 4-(dimethylamino)butanoate (MC3), 1,1′-(2-(4-(2-((2-(bis(2-hydroxydodecyl)amino)ethyl)(2-hydroxydodecyl)amino)ethyl)piperazin-1-yl)ethylazanediyl)didodecan-2-ol (Tech G1), or a mixture thereof. The cationic lipid can comprise from about 20 mol% to about 50 mol% or about 40 mol% of the total lipid present in the particle.

[0324] In another embodiment, the compound 2,2-Dilinoleyl-4-dimethylaminoethyl-[1,3]-dioxolane can be used to prepare lipid-santisense polynucleotide agent nanoparticles. Synthesis of 2,2-Dilinoleyl-4-dimethylaminoethyl-[1,3]-dioxolane is described in U.S. Provisional Pat. Application No. 61/107,998 filed on Oct. 23, 2008, which is herein incorporated by reference.

[0325] In one embodiment, the lipid-antisense polynucleotide agent particle includes 40% 2, 2-Dilinoleyl-4-dimethylaminoethyl-[1,3]-dioxolane: 10% DSPC: 40% Cholesterol: 10% PEG-C-DOMG (mole percent) with a particle size of 63.0 ± 20 nm and a 0.027 antisense polynucleotide agent/Lipid Ratio.

[0326] The ionizable/non-cationic lipid can be an anionic lipid or a neutral lipid including, but not limited to, distearoylphosphatidylcholine (DSPC), dioleoylphosphatidylcholine (DOPC), dipalmitoylphosphatidylcholine (DPPC), dioleoylphosphatidylglycerol (DOPG), dipalmitoylphosphatidylglycerol (DPPG), dioleoyl-phosphatidylethanolamine (DOPE), palmitoyloleoylphosphatidylcholine (POPC), palmitoyloleoylphosphatidylethanolamine (POPE), dioleoyl- phosphatidylethanolamine 4-(N-maleimidomethyl)-cyclohexane-1-carboxylate (DOPE-mal), dipalmitoyl phosphatidyl ethanolamine (DPPE), dimyristoylphosphoethanolamine (DMPE), distearoyl-phosphatidyl-ethanolamine (DSPE), 16-O-monomethyl PE, 16-O-dimethyl PE, 18-1 -trans PE, 1 -stearoyl-2-oleoyl-phosphatidyethanolamine (SOPE), cholesterol, or a mixture thereof. The non-cationic lipid can be from about 5 mol% to about 90 mol%, about 10 mol%, or about 58 mol% if cholesterol is included, of the total lipid present in the particle.

[0327] The conjugated lipid that inhibits aggregation of particles can be, for example, a polyethyleneglycol (PEG)-lipid including, without limitation, a PEG-diacylglycerol (DAG), a PEG-dialkyloxypropyl (DAA), a PEG-phospholipid, a PEG-ceramide (Cer), or a mixture thereof. The PEG-DAA conjugate can be, for example, a PEG-dilauryloxypropyl (Ci₂), a PEG-dimyristyloxypropyl (Ci₄), a PEG-dipalmityloxypropyl (Ci₆), or a PEG-distearyloxypropyl (C]₈). The conjugated lipid that prevents aggregation of particles can be from 0 mol% to about 20 mol% or about 2 mol% of the total lipid present in the particle.

[0328] In some embodiments, the nucleic acid-lipid particle further includes cholesterol at, e.g., about 10 mol% to about 60 mol% or about 48 mol% of the total lipid present in the particle.

[0329] In one embodiment, the lipidoid ND98·4HCl (MW 1487) (see U.S. Pat. Application No. 12/056,230, filed Mar. 26, 2008, which is incorporated herein by reference), Cholesterol (Sigma-Aldrich), and PEG-Ceramide C16 (Avanti Polar Lipids) can be used to prepare lipid-antisense polynucleotide agent nanoparticles (i.e., LNP01 particles). Stock solutions of each in ethanol can be prepared as follows: ND98, 133 mg/ml; Cholesterol, 25 mg/ml, PEG-Ceramide C16, 100 mg/ml. The ND98, Cholesterol, and PEG-Ceramide C16 stock solutions can then be combined in a, e.g., 42:48:10 molar ratio. The combined lipid solution can be mixed with aqueous antisense polynucleotide agent (e.g., in sodium acetate pH 5) such that the final ethanol concentration is about 35-45% and the final sodium acetate concentration is about 100-300 mM. Lipid-antisense polynucleotide agent nanoparticles typically form spontaneously upon mixing. Depending on the desired particle size distribution, the resultant nanoparticle mixture can be extruded through a polycarbonate membrane (e.g., 100 nm cutoff) using, for example, a thermobarrel extruder, such as Lipex Extruder (Northern Lipids, Inc). In some cases, the extrusion step can be omitted. Ethanol removal and simultaneous buffer exchange can be accomplished by, for example, dialysis or tangential flow filtration. Buffer can be exchanged with, for example, phosphate buffered saline (PBS) at about pH 7, e.g., about pH 6.9, about pH 7.0, about pH 7.1, about pH 7.2, about pH 7.3, or about pH 7.4.

[chemical structure]

[0330] LNP01 formulations are described, e.g., in International Application Publication No. WO 2008/042973, which is hereby incorporated by reference.

[0331] Additional exemplary lipid-antisense polynucleotide agent formulations are described in Table 1.

TABLE 1

| | | |
|---|---|---|
| | Ionizable/Cationic Lipid | cationic lipid/non-cationic lipid/cholesterol/PEG-lipid conjugate Lipid:santisense polynucleotide agent ratio |
| SNALP-1 | 1,2-Dilinolenyloxy-N,N-dimethylaminopropane (DLinDMA) | DLinDMA/DPPC/Cholesterol/PEG-cDMA (57.1/7.1/34.4/1.4) lipid:santisense polynucleotide agent ~ 7:1 |
| 2-XTC | 2,2-Dilinoleyl-4-dimethylaminoethyl-[1,3]-dioxolane (XTC) | XTC/DPPC/Cholesterol/PEG-cDMA 57.1/7.1/34.4/1.4 lipid:santisense polynucleotide agent ~ 7:1 |
| LNP05 | 2,2-Dilinoleyl-4-dimethylaminoethyl-[1,3]-dioxolane (XTC) | XTC/DSPC/Cholesterol/PEG-DMG 57.5/7.5/31.5/3.5 lipid:santisense polynucleotide agent ~ 6:1 |
| LNP06 | 2,2-Dilinoleyl-4-dimethylaminoethyl-[1,3]-dioxolane (XTC) | XTC/DSPC/Cholesterol/PEG-DMG 57.5/7.5/31.5/3.5 lipid:santisense polynucleotide agent ~ 11: 1 |
| LNP07 | 2,2-Dilinoleyl-4-dimethylaminoethyl-[1,3]-dioxolane (XTC) | XTC/DSPC/Cholesterol/PEG-DMG 60/7.5/31/1.5, lipid:santisense polynucleotide agent ~ 6:1 |
| LNP08 | 2,2-Dilinoleyl-4-dimethylaminoethyl-[1,3]-dioxolane (XTC) | XTC/DSPC/Cholesterol/PEG-DMG 60/7.5/31/1.5, lipid:santisense polynucleotide agent ~ 11: 1 |
| LNP09 | 2,2-Dilinoleyl-4-dimethylaminoethyl-[1,3]-dioxolane (XTC) | XTC/DSPC/Cholesterol/PEG-DMG 50/10/38.5/1.5 Lipid:santisense polynucleotide agent 10: 1 |
| LNP10 | (3aR,5s,6aS)-N,N-dimethyl-2,2-di((9Z,12Z)-octadeca-9,12-dienyl)tetrahydro-3aH-cyclopenta[d] [1,3]dioxol-5-amine (ALN100) | ALN100/DSPC/Cholesterol/PEG-DMG 50/10/38.5/1.5 Lipid:santisense polynucleotide agent 10: 1 |
| LNP11 | (6Z,9Z,28Z,31Z)-heptatriaconta-6,9,28,31-tetraen-19-yl 4-(dimethylamino)butanoate (MC3) | MC-3/DSPC/Cholesterol/PEG-DMG 50/10/38.5/1.5 Lipid:santisense polynucleotide agent 10: 1 |
| LNP12 | 1,1′-(2-(4-(2-((2-(bis(2-hydroxydodecyl)amino)ethyl)(2- | Tech G1/DSPC/Cholesterol/PEG-DMG 50/10/38.5/1.5 |
| | hydroxydodecyl)amino)ethyl)piperazin-1-yl)ethylazanediyl)didodecan-2-ol (Tech G1) | Lipid:santisense polynucleotide agent 10: 1 |
| LNP13 | XTC | XTC/DSPC/Chol/PEG-DMG 50/10/38.5/1.5 Lipid:santisense polynucleotide agent: 33:1 |
| LNP14 | MC3 | MC3/DSPC/Chol/PEG-DMG 40/15/40/5 Lipid:santisense polynucleotide agent: 11: 1 |
| LNP15 | MC3 | MC3/DSPC/Chol/PEG-DSG/GalNAc-PEG-DSG 50/10/35/4.5/0.5 Lipid:santisense polynucleotide agent: 11: 1 |
| LNP16 | MC3 | MC3/DSPC/Chol/PEG-DMG 50/10/38.5/1.5 Lipid:santisense polynucleotide agent: 7:1 |
| LNP17 | MC3 | MC3/DSPC/Chol/PEG-DSG 50/10/38.5/1.5 Lipid:santisense polynucleotide agent: 10: 1 |
| LNP18 | MC3 | MC3/DSPC/Chol/PEG-DMG 50/10/38.5/1.5 Lipid:santisense polynucleotide agent: 12:1 |
| LNP19 | MC3 | MC3/DSPC/Chol/PEG-DMG 50/10/35/5 Lipid:santisense polynucleotide agent: 8:1 |
| LNP20 | MC3 | MC3/DSPC/Chol/PEG-DPG 50/10/38.5/1.5 Lipid:santisense polynucleotide agent: 10: 1 |
| LNP21 | C12-200 | C12-200/DSPC/Chol/PEG-DSG 50/10/38.5/1.5 Lipid:santisense polynucleotide agent: 7:1 |
| LNP22 | XTC | XTC/DSPC/Chol/PEG-DSG 50/10/38.5/1.5 Lipid:santisense polynucleotide agent: 10: 1 |

DSPC: distearoylphosphatidylcholine
DPPC: dipalmitoylphosphatidylcholine
PEG-DMG: PEG-didimyristoyl glycerol (C14-PEG, or PEG-C14) (PEG with avg mol wt of 2000)
PEG-DSG: PEG-distyryl glycerol (C18-PEG, or PEG-C18) (PEG with avg mol wt of 2000)
PEG-cDMA: PEG-carbamoyl-1,2-dimyristyloxypropylamine (PEG with avg mol wt of 2000) SNALP (1,2-Dilinolenyloxy-N,N-dimethylaminopropane (DLinDMA)) comprising formulations are described in International Publication No. WO2009/127060, filed Apr. 15, 2009, which is hereby incorporated by reference.

[0332] XTC comprising formulations are described, e.g., in U.S. Provisional Serial No. 61/148,366, filed Jan. 29, 2009; U.S. Provisional Serial No. 61/156,851, filed Mar. 2, 2009; U.S. Provisional Serial No. filed Jun. 10, 2009; U.S. Provisional Serial No. 61/228,373, filed Jul. 24, 2009; U.S. Provisional Serial No. 61/239,686, filed Sep. 3, 2009, and International Application No. PCT/US2010/022614, filed Jan. 29, 2010, which are hereby incorporated by reference.

[0333] MC3 comprising formulations are described, e.g., in U.S. Publication No. 2010/0324120, filed Jun. 10, 2010, the entire contents of which are hereby incorporated by reference.

[0334] ALNY-100 comprising formulations are described, e.g., International patent application number PCT/US09/63933, filed on Nov. 10, 2009, which is hereby incorporated by reference.

[0335] C12-200 comprising formulations are described in U.S. Provisional Serial No. 61/175,770, filed May 5, 2009 and International Application No. PCT/US10/33777, filed May 5, 2010, which are hereby incorporated by reference.

[0336] Compositions and formulations for oral administration include powders or granules, microparticulates, nanoparticulates, suspensions or solutions in water or non-aqueous media, capsules, gel capsules, sachets, tablets or minitablets. Thickeners, flavoring agents, diluents, emulsifiers, dispersing aids or binders can be desirable. In some embodiments, oral formulations are those in which the antisense polynucleotide agents featured in the invention are administered in conjunction with one or more penetration enhancer surfactants and chelators. Suitable surfactants include fatty acids and/or esters or salts thereof, bile acids and/or salts thereof. Suitable bile acids/salts include chenodeoxycholic acid (CDCA) and ursodeoxychenodeoxycholic acid (UDCA), cholic acid, dehydrocholic acid, deoxycholic acid, glucholic acid, glycholic acid, glycodeoxycholic acid, taurocholic acid, taurodeoxycholic acid, sodium tauro-24,25-dihydro-fusidate and sodium glycodihydrofusidate. Suitable fatty acids include arachidonic acid, undecanoic acid, oleic acid, lauric acid, caprylic acid, capric acid, myristic acid, palmitic acid, stearic acid, linoleic acid, linolenic acid, dicaprate, tricaprate, monoolein, dilaurin, glyceryl 1-monocaprate, 1-dodecylazacycloheptan-2-one, an acylcarnitine, an acylcholine, or a monoglyceride, a diglyceride or a pharmaceutically acceptable salt thereof (e.g., sodium). In some embodiments, combinations of penetration enhancers are used, for example, fatty acids/salts in combination with bile acids/salts. One exemplary combination is the sodium salt of lauric acid, capric acid and UDCA. Further penetration enhancers include polyoxyethylene-9-lauryl ether, polyoxyethylene-20-cetyl ether. Antisense polynucleotide agents featured in the invention can be delivered orally, in granular form including sprayed dried particles, or complexed to form micro or nanoparticles. Antisense polynucleotide agent complexing agents include poly-amino acids; polyimines; polyacrylates; polyalkylacrylates, polyoxethanes, polyalkylcyanoacrylates; cationized gelatins, albumins, starches, acrylates, polyethyleneglycols (PEG) and starches; polyalkylcyanoacrylates; DEAE-derivatized polyimines, pollulans, celluloses and starches. Suitable complexing agents include chitosan, N-trimethylchitosan, poly-L-lysine, polyhistidine, polyornithine, polyspermines, protamine, polyvinylpyridine, polythiodiethylaminomethylethylene P(TDAE), polyaminostyrene (e.g., p-amino), poly(methylcyanoacrylate), poly(ethylcyanoacrylate), poly(butylcyanoacrylate), poly(isobutylcyanoacrylate), poly(isohexylcynaoacrylate), DEAE-methacrylate, DEAE-hexylacrylate, DEAE-acrylamide, DEAE-albumin and DEAE-dextran, polymethylacrylate, polyhexylacrylate, poly(D,L-lactic acid), poly(DL-lactic-co-glycolic acid (PLGA), alginate, and polyethyleneglycol (PEG). Oral formulations for antisense polynucleotide agents and their preparation are described in detail in U.S. Pat. 6,887,906, U.S. Publn. No. 20030027780, and U.S. Pat. No. 6,747,014, each of which is incorporated herein by reference.

[0337] Compositions and formulations for parenteral, intraparenchymal (into the brain), intrathecal, intraventricular or intrahepatic administration can include sterile aqueous solutions which can also contain buffers, diluents and other suitable additives such as, but not limited to, penetration enhancers, carrier compounds and other pharmaceutically acceptable carriers or excipients.

[0338] Pharmaceutical compositions of the present invention include, but are not limited to, solutions, emulsions, and liposome-containing formulations. These compositions can be generated from a variety of components that include, but are not limited to, preformed liquids, self-emulsifying solids and self-emulsifying semisolids. Particularly preferred are formulations that target the liver, e.g., when treating hepatic disorders, e.g., hepatic carcinoma.

[0339] The pharmaceutical formulations of the present invention, which can conveniently be presented in unit dosage form, can be prepared according to conventional techniques well known in the pharmaceutical industry. Such techniques include the step of bringing into association the active ingredients with the pharmaceutical carrier(s) or excipient(s). In general, the formulations are prepared by uniformly and intimately bringing into association the active ingredients with liquid carriers or finely divided solid carriers or both, and then, if necessary, shaping the product.

[0340] The compositions of the present invention can be formulated into any of many possible dosage forms such as, but not limited to, tablets, capsules, gel capsules, liquid syrups, soft gels, suppositories, and enemas. The compositions of the present invention can also be formulated as suspensions in aqueous, non-aqueous or mixed media. Aqueous suspensions can further contain substances which increase the viscosity of the suspension including, for example, sodium carboxymethylcellulose, sorbitol and/or dextran. The suspension can also contain stabilizers.

### C. Additional Formulations

### I. Emulsions

[0341] The compositions of the present invention can be prepared and formulated as emulsions. Emulsions are typically heterogeneous systems of one liquid dispersed in another in the form of droplets usually exceeding 0.1 µm in diameter (see e.g., Ansel’s Pharmaceutical Dosage Forms and Drug Delivery Systems, Allen, LV., Popovich NG., and Ansel HC., 2004, Lippincott Williams & Wilkins (8th ed.), New York, NY; Idson, in Pharmaceutical Dosage Forms, Lieberman, Rieger and Banker (Eds.), 1988, Marcel Dekker, Inc., New York, N.Y., volume 1, p. 199; Rosoff, in Pharmaceutical Dosage Forms, Lieberman, Rieger and Banker (Eds.), 1988, Marcel Dekker, Inc., New York, N.Y., Volume 1, p. 245; Block in Pharmaceutical Dosage Forms, Lieberman, Rieger and Banker (Eds.), 1988, Marcel Dekker, Inc., New York, N.Y., volume 2, p. 335; Higuchi et al., in Remington’s Pharmaceutical Sciences, Mack Publishing Co., Easton, Pa., 1985, p. 301). Emulsions are often biphasic systems comprising two immiscible liquid phases intimately mixed and dispersed with each other. In general, emulsions can be of either the water-in-oil (w/o) or the oil-in-water (o/w) variety. When an aqueous phase is finely divided into and dispersed as minute droplets into a bulk oily phase, the resulting composition is called a water-in-oil (w/o) emulsion. Alternatively, when an oily phase is finely divided into and dispersed as minute droplets into a bulk aqueous phase, the resulting composition is called an oil-in-water (o/w) emulsion. Emulsions can contain additional components in addition to the dispersed phases, and the active drug which can be present as a solution in either the aqueous phase, oily phase or itself as a separate phase. Pharmaceutical excipients such as emulsifiers, stabilizers, dyes, and antioxidants can also be present in emulsions as needed. Pharmaceutical emulsions can also be multiple emulsions that are comprised of more than two phases such as, for example, in the case of oil-in-water-in-oil (o/w/o) and water-in-oil-in-water (w/o/w) emulsions. Such complex formulations often provide certain advantages that simple binary emulsions do not. Multiple emulsions in which individual oil droplets of an o/w emulsion enclose small water droplets constitute a w/o/w emulsion. Likewise a system of oil droplets enclosed in globules of water stabilized in an oily continuous phase provides an o/w/o emulsion.

[0342] Emulsions are characterized by little or no thermodynamic stability. Often, the dispersed or discontinuous phase of the emulsion is well dispersed into the external or continuous phase and maintained in this form through the means of emulsifiers or the viscosity of the formulation. Either of the phases of the emulsion can be a semisolid or a solid, as is the case of emulsion-style ointment bases and creams. Other means of stabilizing emulsions entail the use of emulsifiers that can be incorporated into either phase of the emulsion. Emulsifiers can broadly be classified into four categories: synthetic surfactants, naturally occurring emulsifiers, absorption bases, and finely dispersed solids (see e.g., Ansel’s Pharmaceutical Dosage Forms and Drug Delivery Systems, Allen, LV., Popovich NG., and Ansel HC., 2004, Lippincott Williams & Wilkins (8th ed.), New York, NY; Idson, in Pharmaceutical Dosage Forms, Lieberman, Rieger and Banker (Eds.), 1988, Marcel Dekker, Inc., New York, N.Y., volume 1, p. 199).

[0343] Synthetic surfactants, also known as surface active agents, have found wide applicability in the formulation of emulsions and have been reviewed in the literature (see e.g., Ansel’s Pharmaceutical Dosage Forms and Drug Delivery Systems, Allen, LV., Popovich NG., and Ansel HC., 2004, Lippincott Williams & Wilkins (8th ed.), New York, NY; Rieger, in Pharmaceutical Dosage Forms, Lieberman, Rieger and Banker (Eds.), 1988, Marcel Dekker, Inc., New York, N.Y., volume 1, p. 285; Idson, in Pharmaceutical Dosage Forms, Lieberman, Rieger and Banker (Eds.), Marcel Dekker, Inc., New York, N.Y., 1988, volume 1, p. 199). Surfactants are typically amphiphilic and comprise a hydrophilic and a hydrophobic portion. The ratio of the hydrophilic to the hydrophobic nature of the surfactant has been termed the hydrophile/lipophile balance (HLB) and is a valuable tool in categorizing and selecting surfactants in the preparation of formulations. Surfactants can be classified into different classes based on the nature of the hydrophilic group: nonionic, anionic, cationic and amphoteric (see e.g., Ansel’s Pharmaceutical Dosage Forms and Drug Delivery Systems, Allen, LV., Popovich NG., and Ansel HC., 2004, Lippincott Williams & Wilkins (8th ed.), New York, NY Rieger, in Pharmaceutical Dosage Forms, Lieberman, Rieger and Banker (Eds.), 1988, Marcel Dekker, Inc., New York, N.Y., volume 1, p. 285).

[0344] Naturally occurring emulsifiers used in emulsion formulations include lanolin, beeswax, phosphatides, lecithin and acacia. Absorption bases possess hydrophilic properties such that they can soak up water to form w/o emulsions yet retain their semisolid consistencies, such as anhydrous lanolin and hydrophilic petrolatum. Finely divided solids have also been used as good emulsifiers especially in combination with surfactants and in viscous preparations. These include polar inorganic solids, such as heavy metal hydroxides, nonswelling clays such as bentonite, attapulgite, hectorite, kaolin, montmorillonite, colloidal aluminum silicate and colloidal magnesium aluminum silicate, pigments and nonpolar solids such as carbon or glyceryl tristearate.

[0345] A large variety of non-emulsifying materials are also included in emulsion formulations and contribute to the properties of emulsions. These include fats, oils, waxes, fatty acids, fatty alcohols, fatty esters, humectants, hydrophilic colloids, preservatives and antioxidants (Block, in Pharmaceutical Dosage Forms, Lieberman, Rieger and Banker (Eds.), 1988, Marcel Dekker, Inc., New York, N.Y., volume 1, p. 335; Idson, in Pharmaceutical Dosage Forms, Lieberman, Rieger and Banker (Eds.), 1988, Marcel Dekker, Inc., New York, N.Y., volume 1, p. 199).

[0346] Hydrophilic colloids or hydrocolloids include naturally occurring gums and synthetic polymers such as polysaccharides (for example, acacia, agar, alginic acid, carrageenan, guar gum, karaya gum, and tragacanth), cellulose derivatives (for example, carboxymethylcellulose and carboxypropylcellulose), and synthetic polymers (for example, carbomers, cellulose ethers, and carboxyvinyl polymers). These disperse or swell in water to form colloidal solutions that stabilize emulsions by forming strong interfacial films around the dispersed-phase droplets and by increasing the viscosity of the external phase.

[0347] Since emulsions often contain a number of ingredients such as carbohydrates, proteins, sterols and phosphatides that can readily support the growth of microbes, these formulations often incorporate preservatives. Commonly used preservatives included in emulsion formulations include methyl paraben, propyl paraben, quaternary ammonium salts, benzalkonium chloride, esters of p-hydroxybenzoic acid, and boric acid. Antioxidants are also commonly added to emulsion formulations to prevent deterioration of the formulation. Antioxidants used can be free radical scavengers such as tocopherols, alkyl gallates, butylated hydroxyanisole, butylated hydroxytoluene, or reducing agents such as ascorbic acid and sodium metabisulfite, and antioxidant synergists such as citric acid, tartaric acid, and lecithin.

[0348] The application of emulsion formulations via dermatological, oral and parenteral routes and methods for their manufacture have been reviewed in the literature (see e.g., Ansel’s Pharmaceutical Dosage Forms and Drug Delivery Systems, Allen, LV., Popovich NG., and Ansel HC., 2004, Lippincott Williams & Wilkins (8th ed.), New York, NY; Idson, in Pharmaceutical Dosage Forms, Lieberman, Rieger and Banker (Eds.), 1988, Marcel Dekker, Inc., New York, N.Y., volume 1, p. 199). Emulsion formulations for oral delivery have been very widely used because of ease of formulation, as well as efficacy from an absorption and bioavailability standpoint (see e.g., Ansel’s Pharmaceutical Dosage Forms and Drug Delivery Systems, Allen, LV., Popovich NG., and Ansel HC., 2004, Lippincott Williams & Wilkins (8th ed.), New York, NY; Rosoff, in Pharmaceutical Dosage Forms, Lieberman, Rieger and Banker (Eds.), 1988, Marcel Dekker, Inc., New York, N.Y., volume 1, p. 245; Idson, in Pharmaceutical Dosage Forms, Lieberman, Rieger and Banker (Eds.), 1988, Marcel Dekker, Inc., New York, N.Y., volume 1, p. 199). Mineral-oil base laxatives, oil-soluble vitamins and high fat nutritive preparations are among the materials that have commonly been administered orally as o/w emulsions.

### II. Microemulsions

[0349] In one embodiment of the present invention, the compositions of antisense polynucleotide agents are formulated as microemulsions. A microemulsion can be defined as a system of water, oil and amphiphile which is a single optically isotropic and thermodynamically stable liquid solution (see e.g., Ansel’s Pharmaceutical Dosage Forms and Drug Delivery Systems, Allen, LV., Popovich NG., and Ansel HC., 2004, Lippincott Williams & Wilkins (8th ed.), New York, NY; Rosoff, in Pharmaceutical Dosage Forms, Lieberman, Rieger and Banker (Eds.), 1988, Marcel Dekker, Inc., New York, N.Y., volume 1, p. 245). Typically microemulsions are systems that are prepared by first dispersing an oil in an aqueous surfactant solution and then adding a sufficient amount of a fourth component, generally an intermediate chain-length alcohol to form a transparent system. Therefore, microemulsions have also been described as thermodynamically stable, isotropically clear dispersions of two immiscible liquids that are stabilized by interfacial films of surface-active molecules (Leung and Shah, in: Controlled Release of Drugs: Polymers and Aggregate Systems, Rosoff, M., Ed., 1989, VCH Publishers, New York, pages 185-215). Microemulsions commonly are prepared via a combination of three to five components that include oil, water, surfactant, cosurfactant and electrolyte. Whether the microemulsion is of the water-in-oil (w/o) or an oil-in-water (o/w) type is dependent on the properties of the oil and surfactant used and on the structure and geometric packing of the polar heads and hydrocarbon tails of the surfactant molecules (Schott, in Remington’s Pharmaceutical Sciences, Mack Publishing Co., Easton, Pa., 1985, p. 271).

[0350] The phenomenological approach utilizing phase diagrams has been extensively studied and has yielded a comprehensive knowledge, to one skilled in the art, of how to formulate microemulsions (see e.g., Ansel’s Pharmaceutical Dosage Forms and Drug Delivery Systems, Allen, LV., Popovich NG., and Ansel HC., 2004, Lippincott Williams & Wilkins (8th ed.), New York, NY; Rosoff, in Pharmaceutical Dosage Forms, Lieberman, Rieger and Banker (Eds.), 1988, Marcel Dekker, Inc., New York, N.Y., volume 1, p. 245; Block, in Pharmaceutical Dosage Forms, Lieberman, Rieger and Banker (Eds.), 1988, Marcel Dekker, Inc., New York, N.Y., volume 1, p. 335). Compared to conventional emulsions, microemulsions offer the advantage of solubilizing water-insoluble drugs in a formulation of thermodynamically stable droplets that are formed spontaneously.

[0351] Surfactants used in the preparation of microemulsions include, but are not limited to, ionic surfactants, non-ionic surfactants, Brij 96, polyoxyethylene oleyl ethers, polyglycerol fatty acid esters, tetraglycerol monolaurate (ML310), tetraglycerol monooleate (MO310), hexaglycerol monooleate (PO310), hexaglycerol pentaoleate (PO500), decaglycerol monocaprate (MCA750), decaglycerol monooleate (MO750), decaglycerol sequioleate (SO750), decaglycerol decaoleate (DAO750), alone or in combination with cosurfactants. The cosurfactant, usually a short-chain alcohol such as ethanol, 1-propanol, and 1-butanol, serves to increase the interfacial fluidity by penetrating into the surfactant film and consequently creating a disordered film because of the void space generated among surfactant molecules. Microemulsions can, however, be prepared without the use of cosurfactants and alcohol-free self-emulsifying microemulsion systems are known in the art. The aqueous phase can typically be, but is not limited to, water, an aqueous solution of the drug, glycerol, PEG300, PEG400, polyglycerols, propylene glycols, and derivatives of ethylene glycol. The oil phase can include, but is not limited to, materials such as Captex 300, Captex 355, Capmul MCM, fatty acid esters, medium chain (C8-C12) mono, di, and tri-glycerides, polyoxyethylated glyceryl fatty acid esters, fatty alcohols, polyglycolized glycerides, saturated polyglycolized C8-C10 glycerides, vegetable oils and silicone oil.

[0352] Microemulsions are particularly of interest from the standpoint of drug solubilization and the enhanced absorption of drugs. Lipid based microemulsions (both o/w and w/o) have been proposed to enhance the oral bioavailability of drugs, including peptides (see e.g., U.S. Pat. Nos. 6,191,105; 7,063,860; 7,070,802; 7,157,099; Constantinides et al., Pharmaceutical Research, 1994, 11, 1385-1390; Ritschel, Meth. Find. Exp. Clin. Pharmacol., 1993, 13, 205). Microemulsions afford advantages of improved drug solubilization, protection of drug from enzymatic hydrolysis, possible enhancement of drug absorption due to surfactant-induced alterations in membrane fluidity and permeability, ease of preparation, ease of oral administration over solid dosage forms, improved clinical potency, and decreased toxicity (see e.g., U.S. Pat. Nos. 6,191,105; 7,063,860; 7,070,802; 7,157,099; Constantinides et al., Pharmaceutical Research, 1994, 11, 1385; Ho et al., J. Pharm. Sci., 1996, 85, 138-143). Often microemulsions can form spontaneously when their components are brought together at ambient temperature. This can be particularly advantageous when formulating thermolabile drugs, peptides or antisense polynucleotide agents. Microemulsions have also been effective in the transdermal delivery of active components in both cosmetic and pharmaceutical applications. It is expected that the microemulsion compositions and formulations of the present invention will facilitate the increased systemic absorption of antisense polynucleotide agents from the gastrointestinal tract, as well as improve the local cellular uptake of antisense polynucleotide agents and nucleic acids.

[0353] Microemulsions of the present invention can also contain additional components and additives such as sorbitan monostearate (Grill 3), Labrasol, and penetration enhancers to improve the properties of the formulation and to enhance the absorption of the antisense polynucleotide agents of the present invention. Penetration enhancers used in the microemulsions of the present invention can be classified as belonging to one of five broad categories--surfactants, fatty acids, bile salts, chelating agents, and non-chelating non-surfactants (Lee et al., Critical Reviews in Therapeutic Drug Carrier Systems, 1991, p. 92). Each of these classes has been discussed above.

### III. Microparticles

[0354] An antisense polynucleotide agent of the invention may be incorporated into a particle, e.g., a microparticle. Microparticles can be produced by spray-drying, but may also be produced by other methods including lyophilization, evaporation, fluid bed drying, vacuum drying, or a combination of these techniques.

### IV. Penetration Enhancers

[0355] In one embodiment, the present invention employs various penetration enhancers to effect the efficient delivery of nucleic acids, particularly antisense polynucleotide agents, to the skin of animals. Most drugs are present in solution in both ionized and nonionized forms. However, usually only lipid soluble or lipophilic drugs readily cross cell membranes. It has been discovered that even non-lipophilic drugs can cross cell membranes if the membrane to be crossed is treated with a penetration enhancer. In addition to aiding the diffusion of non-lipophilic drugs across cell membranes, penetration enhancers also enhance the permeability of lipophilic drugs.

[0356] Penetration enhancers can be classified as belonging to one of five broad categories, i.e., surfactants, fatty acids, bile salts, chelating agents, and non-chelating non-surfactants (see e.g., Malmsten, M. Surfactants and polymers in drug delivery, Informa Health Care, New York, NY, 2002; Lee et al., Critical Reviews in Therapeutic Drug Carrier Systems, 1991, p.92). Each of the above mentioned classes of penetration enhancers are described below in greater detail.

[0357] Surfactants (or “surface-active agents”) are chemical entities which, when dissolved in an aqueous solution, reduce the surface tension of the solution or the interfacial tension between the aqueous solution and another liquid, with the result that absorption of antisense polynucleotide agents through the mucosa is enhanced. In addition to bile salts and fatty acids, these penetration enhancers include, for example, sodium lauryl sulfate, polyoxyethylene-9-lauryl ether and polyoxyethylene-20-cetyl ether) (see e.g., Malmsten, M. Surfactants and polymers in drug delivery, Informa Health Care, New York, NY, 2002; Lee et al., Critical Reviews in Therapeutic Drug Carrier Systems, 1991, p.92); and perfluorochemical emulsions, such as FC-43. Takahashi et al., J. Pharm. Pharmacol., 1988, 40, 252).

[0358] Various fatty acids and their derivatives which act as penetration enhancers include, for example, oleic acid, lauric acid, capric acid (n-decanoic acid), myristic acid, palmitic acid, stearic acid, linoleic acid, linolenic acid, dicaprate, tricaprate, monoolein (1-monooleoyl-rac-glycerol), dilaurin, caprylic acid, arachidonic acid, glycerol 1-monocaprate, 1-dodecylazacycloheptan-2-one, acylcarnitines, acylcholines, C₁₋₂₀ alkyl esters thereof (e.g., methyl, isopropyl and t-butyl), and mono- and di-glycerides thereof (i.e., oleate, laurate, caprate, myristate, palmitate, stearate, linoleate, etc.) (see e.g., Touitou, E., et al. Enhancement in Drug Delivery, CRC Press, Danvers, MA, 2006; Lee et al., Critical Reviews in Therapeutic Drug Carrier Systems, 1991, p.92; Muranishi, Critical Reviews in Therapeutic Drug Carrier Systems, 1990, 7, 1-33; El Hariri et al., J. Pharm. Pharmacol., 1992, 44, 651-654).

[0359] The physiological role of bile includes the facilitation of dispersion and absorption of lipids and fat-soluble vitamins (see e.g., Malmsten, M. Surfactants and polymers in drug delivery, Informa Health Care, New York, NY, 2002; Brunton, Chapter 38 in: Goodman & Gilman’s The Pharmacological Basis of Therapeutics, 9th Ed., Hardman et al. Eds., McGraw-Hill, New York, 1996, pp. 934-935). Various natural bile salts, and their synthetic derivatives, act as penetration enhancers. Thus the term “bile salts” includes any of the naturally occurring components of bile as well as any of their synthetic derivatives. Suitable bile salts include, for example, cholic acid (or its pharmaceutically acceptable sodium salt, sodium cholate), dehydrocholic acid (sodium dehydrocholate), deoxycholic acid (sodium deoxycholate), glucholic acid (sodium glucholate), glycholic acid (sodium glycocholate), glycodeoxycholic acid (sodium glycodeoxycholate), taurocholic acid (sodium taurocholate), taurodeoxycholic acid (sodium taurodeoxycholate), chenodeoxycholic acid (sodium chenodeoxycholate), ursodeoxycholic acid (UDCA), sodium tauro-24,25-dihydro-fusidate (STDHF), sodium glycodihydrofusidate and polyoxyethylene-9-lauryl ether (POE) (see e.g., Malmsten, M. Surfactants and polymers in drug delivery, Informa Health Care, New York, NY, 2002; Lee et al., Critical Reviews in Therapeutic Drug Carrier Systems, 1991, page 92; Swinyard, Chapter 39 In: Remington’s Pharmaceutical Sciences, 18th Ed., Gennaro, ed., Mack Publishing Co., Easton, Pa., 1990, pages 782-783; Muranishi, Critical Reviews in Therapeutic Drug Carrier Systems, 1990, 7, 1-33; Yamamoto et al., J. Pharm. Exp. Ther., 1992, 263, 25; Yamashita et al., J. Pharm. Sci., 1990, 79, 579-583).

[0360] Chelating agents, as used in connection with the present invention, can be defined as compounds that remove metallic ions from solution by forming complexes therewith, with the result that absorption of antisense polynucleotide agents through the mucosa is enhanced. With regards to their use as penetration enhancers in the present invention, chelating agents have the added advantage of also serving as DNase inhibitors, as most characterized DNA nucleases require a divalent metal ion for catalysis and are thus inhibited by chelating agents (Jarrett, J. Chromatogr., 1993, 618, 315-339). Suitable chelating agents include but are not limited to disodium ethylenediaminetetraacetate (EDTA), citric acid, salicylates (e.g., sodium salicylate, 5-methoxysalicylate and homovanilate), N-acyl derivatives of collagen, laureth-9 and N-amino acyl derivatives of beta-diketones (enamines)(see e.g., Katdare, A. et al., Excipient development for pharmaceutical, biotechnology, and drug delivery, CRC Press, Danvers, MA, 2006; Lee et al., Critical Reviews in Therapeutic Drug Carrier Systems, 1991, page 92; Muranishi, Critical Reviews in Therapeutic Drug Carrier Systems, 1990, 7, 1-33; Buur et al., J. Control Rel., 1990, 14, 43-51).

[0361] As used herein, non-chelating non-surfactant penetration enhancing compounds can be defined as compounds that demonstrate insignificant activity as chelating agents or as surfactants but that nonetheless enhance absorption of antisense polynucleotide agents through the alimentary mucosa (see e.g., Muranishi, Critical Reviews in Therapeutic Drug Carrier Systems, 1990, 7, 1-33). This class of penetration enhancers includes, for example, unsaturated cyclic ureas, 1-alkyl- and 1-alkenylazacyclo-alkanone derivatives (Lee et al., Critical Reviews in Therapeutic Drug Carrier Systems, 1991, page 92); and non-steroidal anti-inflammatory agents such as diclofenac sodium, indomethacin and phenylbutazone (Yamashita et al., J. Pharm. Pharmacol., 1987, 39, 621-626).

[0362] Agents that enhance uptake of antisense polynucleotide agents at the cellular level can also be added to the pharmaceutical and other compositions of the present invention. For example, cationic lipids, such as lipofectin (Junichi et al, U.S. Pat. No. 5,705,188), cationic glycerol derivatives, and polycationic molecules, such as polylysine (Lollo et al., PCT Application WO 97/30731), are also known to enhance the cellular uptake of antisense polynucleotide agents. Examples of commercially available transfection reagents include, for example Lipofectamine™ (Invitrogen; Carlsbad, CA), Lipofectamine 2000™ (Invitrogen; Carlsbad, CA), 293fectin™ (Invitrogen; Carlsbad, CA), Cellfectin™ (Invitrogen; Carlsbad, CA), DMRIE-C™ (Invitrogen; Carlsbad, CA), FreeStyle™ MAX (Invitrogen; Carlsbad, CA), Lipofectamine™ 2000 CD (Invitrogen; Carlsbad, CA), Lipofectamine™ (Invitrogen; Carlsbad, CA), RNAiMAX (Invitrogen; Carlsbad, CA), Oligofectamine™ (Invitrogen; Carlsbad, CA), Optifect™ (Invitrogen; Carlsbad, CA), X-tremeGENE Q2 Transfection Reagent (Roche; Grenzacherstrasse, Switzerland), DOTAP Liposomal Transfection Reagent (Grenzacherstrasse, Switzerland), DOSPER Liposomal Transfection Reagent (Grenzacherstrasse, Switzerland), or Fugene (Grenzacherstrasse, Switzerland), Transfectam® Reagent (Promega; Madison, WI), TransFast™ Transfection Reagent (Promega; Madison, WI), Tfx™-20 Reagent (Promega; Madison, WI), Tfx™-50 Reagent (Promega; Madison, WI), DreamFect™ (OZ Biosciences; Marseille, France), EcoTransfect (OZ Biosciences; Marseille, France), TransPass^{a} D1 Transfection Reagent (New England Biolabs; Ipswich, MA, USA), LyoVec™/LipoGen™ (Invitrogen; San Diego, CA, USA), PerFectin Transfection Reagent (Genlantis; San Diego, CA, USA), NeuroPORTER Transfection Reagent (Genlantis; San Diego, CA, USA), GenePORTER Transfection reagent (Genlantis; San Diego, CA, USA), GenePORTER 2 Transfection reagent (Genlantis; San Diego, CA, USA), Cytofectin Transfection Reagent (Genlantis; San Diego, CA, USA), BaculoPORTER Transfection Reagent (Genlantis; San Diego, CA, USA), TroganPORTER™ transfection Reagent (Genlantis; San Diego, CA, USA ), RiboFect (Bioline; Taunton, MA, USA), PlasFect (Bioline; Taunton, MA, USA), UniFECTOR (B-Bridge International; Mountain View, CA, USA), SureFECTOR (B-Bridge International; Mountain View, CA, USA), or HiFect™ (B-Bridge International, Mountain View, CA, USA), among others.

[0363] Other agents can be utilized to enhance the penetration of the administered nucleic acids, including glycols such as ethylene glycol and propylene glycol, pyrrols such as 2-pyrrol, azones, and terpenes such as limonene and menthone.

### V. Carriers

[0364] Certain compositions of the present invention also incorporate carrier compounds in the formulation. As used herein, “carrier compound” or “carrier” can refer to a nucleic acid, or analog thereof, which is inert (i.e., does not possess biological activity per se) but is recognized as a nucleic acid by in vivo processes that reduce the bioavailability of a nucleic acid having biological activity by, for example, degrading the biologically active nucleic acid or promoting its removal from circulation. The coadministration of a nucleic acid and a carrier compound, typically with an excess of the latter substance, can result in a substantial reduction of the amount of nucleic acid recovered in the liver, kidney or other extracirculatory reservoirs, presumably due to competition between the carrier compound and the nucleic acid for a common receptor. For example, the recovery of a partially phosphorothioated antisense polynucleotide agent in hepatic tissue can be reduced when it is coadministered with polyinosinic acid, dextran sulfate, polycytidic acid or 4-acetamido-4′isothiocyano-stilbene-2,2′-disulfonic acid (Miyao et al., Antisense polynucleotide agent Res. Dev., 1995, 5, 115-121; Takakura et al., Antisense polynucleotide agent & Nucl. Acid Drug Dev., 1996, 6, 177-183.

### VI. Excipients

[0365] In contrast to a carrier compound, a “pharmaceutical carrier” or “excipient” is a pharmaceutically acceptable solvent, suspending agent or any other pharmacologically inert vehicle for delivering one or more nucleic acids to an animal. The excipient can be liquid or solid and is selected, with the planned manner of administration in mind, so as to provide for the desired bulk, consistency, etc., when combined with a nucleic acid and the other components of a given pharmaceutical composition. Typical pharmaceutical carriers include, but are not limited to, binding agents (e.g., pregelatinized maize starch, polyvinylpyrrolidone or hydroxypropyl methylcellulose, etc.); fillers (e.g., lactose and other sugars, microcrystalline cellulose, pectin, gelatin, calcium sulfate, ethyl cellulose, polyacrylates or calcium hydrogen phosphate, etc.); lubricants (e.g., magnesium stearate, talc, silica, colloidal silicon dioxide, stearic acid, metallic stearates, hydrogenated vegetable oils, corn starch, polyethylene glycols, sodium benzoate, sodium acetate, etc.); disintegrants (e.g., starch, sodium starch glycolate, etc.); and wetting agents (e.g., sodium lauryl sulphate, etc).

[0366] Pharmaceutically acceptable organic or inorganic excipients suitable for non-parenteral administration which do not deleteriously react with nucleic acids can also be used to formulate the compositions of the present invention. Suitable pharmaceutically acceptable carriers include, but are not limited to, water, salt solutions, alcohols, polyethylene glycols, gelatin, lactose, amylose, magnesium stearate, talc, silicic acid, viscous paraffin, hydroxymethylcellulose, polyvinylpyrrolidone and the like.

[0367] Formulations for topical administration of nucleic acids can include sterile and non-sterile aqueous solutions, non-aqueous solutions in common solvents such as alcohols, or solutions of the nucleic acids in liquid or solid oil bases. The solutions can also contain buffers, diluents and other suitable additives. Pharmaceutically acceptable organic or inorganic excipients suitable for non-parenteral administration which do not deleteriously react with nucleic acids can be used.

[0368] Suitable pharmaceutically acceptable excipients include, but are not limited to, water, salt solutions, alcohol, polyethylene glycols, gelatin, lactose, amylose, magnesium stearate, talc, silicic acid, viscous paraffin, hydroxymethylcellulose, polyvinylpyrrolidone and the like.

### VII. Other Components

[0369] The compositions of the present invention can additionally contain other adjunct components conventionally found in pharmaceutical compositions, at their art-established usage levels. Thus, for example, the compositions can contain additional, compatible, pharmaceutically-active materials such as, for example, antipruritics, astringents, local anesthetics or anti-inflammatory agents, or can contain additional materials useful in physically formulating various dosage forms of the compositions of the present invention, such as dyes, flavoring agents, preservatives, antioxidants, opacifiers, thickening agents and stabilizers. However, such materials, when added, should not unduly interfere with the biological activities of the components of the compositions of the present invention. The formulations can be sterilized and, if desired, mixed with auxiliary agents, e.g., lubricants, preservatives, stabilizers, wetting agents, emulsifiers, salts for influencing osmotic pressure, buffers, colorings, flavorings and/or aromatic substances and the like which do not deleteriously interact with the nucleic acid(s) of the formulation.

[0370] Aqueous suspensions can contain substances which increase the viscosity of the suspension including, for example, sodium carboxymethylcellulose, sorbitol and/or dextran. The suspension can also contain stabilizers.

[0371] In some embodiments, pharmaceutical compositions featured in the invention include (a) one or more antisense polynucleotide agents and (b) one or more agents which function by a non-antisense inhibition mechanism and which are useful in treating a hemolytic disorder. Examples of such agents include, but are not lmited to an anti-inflammatory agent, anti-steatosis agent, anti-viral, and/or anti-fibrosis agent. In addition, other substances commonly used to protect the liver, such as silymarin, can also be used in conjunction with the antisense polynucleotide agents described herein. Other agents useful for treating liver diseases include telbivudine, entecavir, and protease inhibitors such as telaprevir and other disclosed, for example, in Tung et al., U.S. Application Publication Nos. 2005/0148548, 2004/0167116, and 2003/0144217; and in Hale et al., U.S. Application Publication No. 2004/0127488.

[0372] Toxicity and therapeutic efficacy of such compounds can be determined by standard pharmaceutical procedures in cell cultures or experimental animals, e.g., for determining the LD₅₀ (the dose lethal to 50% of the population) and the ED₅₀ (the dose therapeutically effective in 50% of the population). The dose ratio between toxic and therapeutic effects is the therapeutic index and it can be expressed as the ratio LD₅₀/ED₅₀. Compounds that exhibit high therapeutic indices are preferred.

[0373] The data obtained from cell culture assays and animal studies can be used in formulating a range of dosage for use in humans. The dosage of compositions featured herein in the invention lies generally within a range of circulating concentrations that include the ED₅₀ with little or no toxicity. The dosage can vary within this range depending upon the dosage form employed and the route of administration utilized. For any compound used in the methods featured in the invention, the therapeutically effective dose can be estimated initially from cell culture assays. A dose can be formulated in animal models to achieve a circulating plasma concentration range of the compound or, when appropriate, of the polypeptide product of a target sequence (e.g., achieving a decreased concentration of the polypeptide) that includes the IC₅₀ (i.e., the concentration of the test compound which achieves a half-maximal inhibition of symptoms) as determined in cell culture. Such information can be used to more accurately determine useful doses in humans. Levels in plasma can be measured, for example, by high performance liquid chromatography.

[0374] In addition to their administration, as discussed above, the antisense polynucleotide agents featured in the invention can be administered in combination with other known agents effective in treatment of pathological processes mediated by AGT expression. In any event, the administering physician can adjust the amount and timing of antisense polynucleotide agent administration on the basis of results observed using standard measures of efficacy known in the art or described herein.

### VII. Methods For Inhibiting AGT Expression

[0375] The present invention provides methods of inhibiting expression of AGT in a cell. The methods include contacting a cell with an antisense polynucleotide agent of the invention in an amount effective to inhibit expression of the AGT in the cell, thereby inhibiting expression of the AGT in the cell.

[0376] Contacting of a cell with an antisense polynucleotide agent may be done in vitro or in vivo. Contacting a cell in vivo with the antisense polynucleotide agent includes contacting a cell or group of cells within a subject, e.g., a human subject, with the antisense polynucleotide agent. Combinations of in vitro and in vivo methods of contacting are also possible. Contacting may be direct or indirect, as discussed above. Furthermore, contacting a cell may be accomplished via a targeting ligand, including any ligand described herein or known in the art. In preferred embodiments, the targeting ligand is a carbohydrate moiety, e.g., a GalNAc₃ ligand, or any other ligand that directs the antisense polynucleotide agent to a site of interest, e.g., the liver of a subject.

[0377] The term “inhibiting,” as used herein, is used interchangeably with “reducing,” “silencing,” “downregulating” and other similar terms, and includes any level of inhibition.

[0378] The phrase “inhibiting expression of an AGT” is intended to refer to inhibition of expression of any AGT gene (such as, e.g., a mouse AGT gene, a rat AGT gene, a monkey AGT gene, or a human AGT gene) as well as variants or mutants of an AGT gene. Thus, the AGT gene may be a wild-type AGT gene, a mutant AGT gene, or a transgenic AGT gene in the context of a genetically manipulated cell, group of cells, or organism.

[0379] “Inhibiting expression of an AGT gene” includes any level of inhibition of an AGT gene, e.g., at least partial suppression of the expression of an AGT gene. The expression of the AGT gene may be assessed based on the level, or the change in the level, of any variable associated with AGT gene expression, e.g., AGT mRNA level, AGT protein level, or for example, blood pressure can be measured in a subject with hypertension to assess AGT expression. This level may be assessed in an individual cell or in a group of cells, including, for example, a sample derived from a subject.

[0380] Inhibition may be assessed by a decrease in an absolute or relative level of one or more variables that are associated with AGT expression compared with a control level. The control level may be any type of control level that is utilized in the art, e.g., a pre-dose baseline level, or a level determined from a similar subject, cell, or sample that is untreated or treated with a control (such as, e.g., buffer only control or inactive agent control).

[0381] In some embodiments of the methods of the invention, expression of an AGT gene is inhibited by at least about 5%, at least about 10%, at least about 15%, at least about 20%, at least about 25%, at least about 30%, at least about 35%, at least about 40%, at least about 45%, at least about 50%, at least about 55%, at least about 60%, at least about 65%, at least about 70%, at least about 75%, at least about 80%, at least about 85%, at least about 90%, at least about 91%, at least about 92%, at least about 93%, at least about 94%. at least about 95%, at least about 96%, at least about 97%, at least about 98%, or at least about 99%. Prefereably expression is inhibited by at least about 20%.

[0382] Inhibition of the expression of an AGT gene may be manifested by a reduction of the amount of mRNA expressed by a first cell or group of cells (such cells may be present, for example, in a sample derived from a subject) in which an AGT gene is transcribed and which has or have been treated (e.g., by contacting the cell or cells with an antisense polynucleotide agent of the invention, or by administering an antisense polynucleotide agent of the invention to a subject in which the cells are or were present) such that the expression of an AGT gene is inhibited, as compared to a second cell or group of cells substantially identical to the first cell or group of cells but which has not or have not been so treated (control cell(s)). In preferred embodiments, the inhibition is assessed by expressing the level of mRNA in treated cells as a percentage of the level of mRNA in control cells, using the following formula:

$$\frac{\left(\text{mRNA in control cells}\right) - \left(\text{mRNA in treated cells}\right)}{\left(\text{mRNA in control cells}\right)} \cdot 100 \%$$

[0383] Alternatively, inhibition of the expression of an AGT gene may be assessed in terms of a reduction of a parameter that is functionally linked to AGT gene expression, e.g., AGT protein expression, mRNA or protein levels of AGT in tissues or serum, blood pressure. AGT gene silencing may be determined in any cell expressing AGT, either constitutively or by genomic engineering, and by any assay known in the art. The liver is the major site of AGT expression.

[0384] Inhibition of the expression of an AGT protein may be manifested by a reduction in the level of the AGT protein that is expressed by a cell or group of cells (e.g., the level of protein expressed in a sample derived from a subject). As explained above for the assessment of mRNA suppression, the inhibiton of protein expression levels in a treated cell or group of cells may similarly be expressed as a percentage of the level of protein in a control cell or group of cells.

[0385] A control cell or group of cells that may be used to assess the inhibition of the expression of an AGT gene includes a cell or group of cells that has not yet been contacted with an antisense polynucleotide agent of the invention. For example, the control cell or group of cells may be derived from an individual subject (e.g., a human or animal subject) prior to treatment of the subject with an antisense polynucleotide agent.

[0386] The level of AGT mRNA that is expressed by a cell or group of cells may be determined using any method known in the art for assessing mRNA expression. In one embodiment, the level of expression of AGT in a sample is determined by detecting a transcribed polynucleotide, or portion thereof, e.g., mRNA of the AGT gene. RNA may be extracted from cells using RNA extraction techniques including, for example, using acid phenol/guanidine isothiocyanate extraction (RNAzol® B; Biogenesis), RNeasy RNA preparation kits (Qiagen®) or PAXgene (PreAnalytix®, Switzerland). Typical assay formats utilizing ribonucleic acid hybridization include nuclear run-on assays, RT-PCR, RNase protection assays (Melton et al., Nuc. Acids Res. 12:7035), northern blotting, in situ hybridization, and microarray analysis.

[0387] In one embodiment, the level of expression of AGT is determined using a nucleic acid probe. The term “probe”, as used herein, refers to any molecule that is capable of selectively binding to a specific AGT. Probes can be synthesized by one of skill in the art, or derived from appropriate biological preparations. Probes may be specifically designed to be labeled. Examples of molecules that can be utilized as probes include, but are not limited to, RNA, DNA, proteins, antibodies, and organic molecules.

[0388] Isolated mRNA can be used in hybridization or amplification assays that include, but are not limited to, Southern or northern analyses, polymerase chain reaction (PCR) analyses and probe arrays. One method for the determination of mRNA levels involves contacting the isolated mRNA with a nucleic acid molecule (probe) that can hybridize to AGT mRNA. In one embodiment, the mRNA is immobilized on a solid surface and contacted with a probe, for example by running the isolated mRNA on an agarose gel and transferring the mRNA from the gel to a membrane, such as nitrocellulose. In an alternative embodiment, the probe(s) are immobilized on a solid surface and the mRNA is contacted with the probe(s), for example, in an Affymetrix® gene chip array. A skilled artisan can readily adapt known mRNA detection methods for use in determining the level of AGT mRNA.

[0389] An alternative method for determining the level of expression of AGT in a sample involves the process of nucleic acid amplification and/or reverse transcriptase (to prepare cDNA) of for example mRNA in the sample, e.g., by RT-PCR (the experimental embodiment set forth in Mullis, 1987, U.S. Pat. No. 4,683,202), ligase chain reaction (Barany (1991) Proc. Natl. Acad. Sci. USA 88:189-193), self sustained sequence replication (Guatelli et al. (1990) Proc. Natl. Acad. Sci. USA 87:1874-1878), transcriptional amplification system (Kwoh et al. (1989) Proc. Natl. Acad. Sci. USA 86:1173-1177), Q-Beta Replicase (Lizardi et al. (1988) Bio/Technology 6:1197), rolling circle replication (Lizardi et al., U.S. Pat. No. 5,854,033) or any other nucleic acid amplification method, followed by the detection of the amplified molecules using techniques well known to those of skill in the art. These detection schemes are especially useful for the detection of nucleic acid molecules if such molecules are present in very low numbers. In particular aspects of the invention, the level of expression of AGT is determined by quantitative fluorogenic RT-PCR (i.e., the TaqMan™ System).

[0390] The expression levels of AGT mRNA may be monitored using a membrane blot (such as used in hybridization analysis such as northern, Southern, dot, and the like), or microwells, sample tubes, gels, beads or fibers (or any solid support comprising bound nucleic acids). See U.S. Pat. Nos. 5,770,722, 5,874,219, 5,744,305, 5,677,195 and 5,445,934, which are incorporated herein by reference. The determination of AGT expression level may also comprise using nucleic acid probes in solution.

[0391] In preferred embodiments, the level of mRNA expression is assessed using branched DNA (bDNA) assays or real time PCR (qPCR). The use of these methods is described and exemplified in the Examples presented herein.

[0392] The level of AGT protein expression may be determined using any method known in the art for the measurement of protein levels. Such methods include, for example, electrophoresis, capillary electrophoresis, high performance liquid chromatography (HPLC), thin layer chromatography (TLC), hyperdiffusion chromatography, fluid or gel precipitin reactions, absorption spectroscopy, a colorimetric assays, spectrophotometric assays, flow cytometry, immunodiffusion (single or double), immunoelectrophoresis, western blotting, radioimmunoassay (RIA), enzyme-linked immunosorbent assays (ELISAs), immunofluorescent assays, electrochemiluminescence assays, and the like.

[0393] The term “sample” as used herein refers to a collection of similar fluids, cells, or tissues isolated from a subject, as well as fluids, cells, or tissues present within a subject. Examples of biological fluids include blood, serum and serosal fluids, plasma, lymph, urine, cerebrospinal fluid, saliva, ocular fluids, and the like. Tissue samples may include samples from tissues, organs or localized regions. For example, samples may be derived from particular organs, parts of organs, or fluids or cells within those organs. In certain embodiments, samples may be derived from the liver (e.g., whole liver or certain segments of liver or certain types of cells in the liver, such as, e.g., hepatocytes). In preferred embodiments, a “sample derived from a subject” refers to blood or plasma drawn from the subject. In further embodiments, a “sample derived from a subject” refers to liver tissue derived from the subject.

[0394] In some embodiments of the methods of the invention, the antisense polynucleotide agent is administered to a subject such that the antisense polynucleotide agent is delivered to a specific site within the subject. The inhibition of expression of AGT may be assessed using measurements of the level or change in the level of AGT mRNA or AGT protein in a sample derived from fluid or tissue from the specific site within the subject. In preferred embodiments, the site is sthe liver. The site may also be a subsection or subgroup of cells from any one of the aforementioned sites. The site may also include cells that express a particular type of receptor.

[0395] The phrase “contacting a cell with an antisense polynucleotide agent,” as used herein, includes contacting a cell by any possible means. Contacting a cell with an antisense polynucleotide agent includes contacting a cell in vitro with the antisense polynucleotide agent or contacting a cell in vivo with the antisense polynucleotide agent. The contacting may be done directly or indirectly. Thus, for example, the antisense polynucleotide agent may be put into physical contact with the cell by the individual performing the method, or alternatively, the antisense polynucleotide agent may be put into a situation that will permit or cause it to subsequently come into contact with the cell.

[0396] Contacting a cell in vitro may be done, for example, by incubating the cell with the antisense polynucleotide agent. Contacting a cell in vivo may be done, for example, by injecting the antisense polynucleotide agent into or near the tissue where the cell is located, or by injecting the antisense polynucleotide agent into another area, e.g., the bloodstream or the subcutaneous space, such that the agent will subsequently reach the tissue where the cell to be contacted is located. For example, the antisense polynucleotide agent may contain and/or be coupled to a ligand, e.g., GalNAc3, that directs the antisense polynucleotide agent to a site of interest, e.g., the liver. Combinations of in vitro and in vivo methods of contacting are also possible. For example, a cell may also be contacted in vitro with an antisense polynucleotide agent and subsequently transplanted into a subject.

[0397] In one embodiment, contacting a cell with an antisense polynucleotide agent includes “introducing” or “delivering the antisense polynucleotide agent into the cell” by facilitating or effecting uptake or absorption into the cell. Absorption or uptake of an antisense polynucleotide agent can occur through unaided diffusive or active cellular processes, or by auxiliary agents or devices. Introducing an antisense polynucleotide agent into a cell may be in vitro and/or in vivo. For example, for in vivo introduction, antisense polynucleotide agent can be injected into a tissue site or administered systemically. In vivo delivery can also be done by a beta-glucan delivery system, such as those described in U.S. Pat. Nos. 5,032,401 and 5,607,677, and U.S. Publication No. 2005/0281781, the entire contents of which are hereby incorporated herein by reference. In vitro introduction into a cell includes methods known in the art such as electroporation and lipofection. Further approaches are described herein below and/or are known in the art.

### VIII. Methods for Treating or Preventing an AGT-Associated Disorders

[0398] The present invention also provides therapeutic and prophylactic methods which include administering to a subject having an AGT-associated disease, e.g., hypertension, an antisense polynucleotide agent or a pharmaceutical composition comprising an antisense polynucleotide agent of the invention. In some aspects of the invention, the methods further include administering to the subject an additional therapeutic agent, such as a diuretic, an angiotensin converting enzyme (ACE) inhibitor, an angiotensin II receptor antagonist, a beta-blocker, a vasodialator, a calcium channel blocker, an aldosterone antagonist, an alpha₂-agonist, a renin inhibitor, an alpha-blocker, a peripheral acting adrenergic agent, a selective D1 receptor partial agonist, a nonselective alpha-adrenergic antagonist, a synthetic, steroidal antimineralocorticoid agent, or a combination of any of the foregoing, and a hypertension therapeutic agent formulated as a combination of agents.

[0399] In one aspect, the present invention provides methods of treating a subject having a disorder that would benefit from reduction in AGT expression, e.g., an AGT-associated disease, e.g., hypertension. The treatment methods (and uses) of the invention include administering to the subject, e.g., a human, a therapeutically effective amount of an antisense polynucleotide agent targeting an AGT gene or a pharmaceutical composition comprising an antisense polynucleotide agent targeting an AGT gene, thereby treating the subject having a disorder that would benefit from reduction in AGT expression.

[0400] In another aspect, the present invention provides methods of treating a subject having a disorder that would benefit from reduction in AGT expression, e.g., an AGT-associated disease, e.g., hypertension, which include administering to the subject, e.g., a human, a therapeutically effective amount of an antisense polynucleotide agent targeting a AGT gene or a pharmaceutical composition comprising an antisense polynucleotide agent targeting an AGT gene, and an additional therapeutic agent, such as a diuretic, an angiotensin converting enzyme (ACE) inhibitor, an angiotensin II receptor antagonist, a beta-blocker, a vasodialator, a calcium channel blocker, an aldosterone antagonist, an alpha₂-agonist, a renin inhibitor, an alpha-blocker, a peripheral acting adrenergic agent, a selective D1 receptor partial agonist, a nonselective alpha-adrenergic antagonist, a synthetic, steroidal antimineralocorticoid agent, or a combination of any of the foregoing, and a hypertension therapeutic agent formulated as a combination of agents, thereby treating the subject having a disorder that would benefit from reduction in AGT expression.

[0401] In one aspect, the invention provides methods of preventing at least one symptom in a subject having a disorder that would benefit from reduction in AGT expression, e.g., an AGT-associated disease, e.g., hypertension. The methods include administering to the subject a prohpylactically effective amount of an antisense polynucleotide agent targeting an AGT gene or a pharmaceutical composition comprising an antisense polynucleotide agent targeting an AGT gene, thereby preventing at least one symptom in the subject having a disorder that would benefit from reduction in AGT expression. For example, the invention provides methods for preventing hypertension in a subject suffering from a disorder that would benefit from reduction in AGT expression.

[0402] In certain aspects, the invention provides methods of preventing at least one symptom in a subject having a disorder that would benefit from reduction in AGT expression, e.g., an AGT-associated disease, e.g., hypertension. The methods include administering to the subject a prohpylactically effective amount of an antisense polynucleotide agent targeting an AGT gene or a pharmaceutical composition comprising an antisense polynucleotide agent targeting an AGT gene, and an additional therapeutic agent, such as a diuretic, an angiotensin converting enzyme (ACE) inhibitor, an angiotensin II receptor antagonist, a beta-blocker, a vasodialator, a calcium channel blocker, an aldosterone antagonist, an alpha₂-agonist, a renin inhibitor, an alpha-blocker, a peripheral acting adrenergic agent, a selective D1 receptor partial agonist, a nonselective alpha-adrenergic antagonist, a synthetic, steroidal antimineralocorticoid agent, or a combination of any of the foregoing, and a hypertension therapeutic agent formulated as a combination of agents, thereby preventing at least one symptom in the subject having a disorder that would benefit from reduction in AGT expression.

[0403] “Therapeutically effective amount,” as used herein, is intended to include the amount of an antisense polynucleotide agent or another agent for treatment of an AGT-associated disease, e.g., a diuretic, an angiotensin converting enzyme (ACE) inhibitor, an angiotensin II receptor antagonist, a beta-blocker, a vasodialator, a calcium channel blocker, an aldosterone antagonist, an alpha₂-agonist, a renin inhibitor, an alpha-blocker, a peripheral acting adrenergic agent, a selective D1 receptor partial agonist, a nonselective alpha-adrenergic antagonist, a synthetic, steroidal antimineralocorticoid agent, or a combination of any of the foregoing, and a hypertension therapeutic agent formulated as a combination of agents, that, when administered to a subject having an AGT-associated disease, is sufficient to effect treatment of the disease (e.g., by diminishing, ameliorating or maintaining the existing disease or one or more symptoms of disease). The “therapeutically effective amount” may vary depending on the antisense polynucleotide agent or the other agent(s) for treatment of the AGT-associated disease, how the agent is administered, the disease and its severity and the history, age, weight, family history, genetic makeup, the types of preceding or concomitant treatments, if any, and other individual characteristics of the subject to be treated.

[0404] “Prophylactically effective amount,” as used herein, is intended to include the amount of an antisense polynucleotide agent other agent(s) for treatment of the AGT-associated disease, that, when administered to a subject having an AGT-associated disease but not yet (or currently) experiencing or displaying symptoms of the disease, and/or a subject at risk of developing an AGT-associated disease, e.g., a subject who is pregnant, e.g., a subject who is overweight, and/or a subject having artherosclerosis, is sufficient to prevent or ameliorate the disease or one or more symptoms of the disease. Ameliorating the disease includes slowing the course of the disease or reducing the severity of later-developing disease. The “prophylactically effective amount” may vary depending on the antisense polynucleotide agent or agent(s) for treatment of the AGT-associated disease, how the agent(s) is administered, the degree of risk of disease, and the history, age, weight, family history, genetic makeup, the types of preceding or concomitant treatments, if any, and other individual characteristics of the patient to be treated.

[0405] A “therapeutically effective amount” or “prophylactically effective amount” also includes an amount of an antisense polynucleotide agent or other agent(s) for treatment of the AGT-associated disease, that produces some desired local or systemic effect at a reasonable benefit/risk ratio applicable to any treatment. Antisense polynucleotide agents employed in the methods of the present invention may be administered in a sufficient amount to produce a reasonable benefit/risk ratio applicable to such treatment.

[0406] In another aspect, the present invention provides uses of a therapeutically effective amount of an antisense polynucleotide agent of the invention for treating a subject, e.g., a subject that would benefit from a reduction and/or inhibition of AGT expression.

[0407] In another aspect, the present invention provides uses of a therapeutically effective amount of an antisense polynucleotide agent of the invention and an additional therapeutic agent(s) for treatment of the AGT-associated disease for treating a subject, e.g., a subject that would benefit from a reduction and/or inhibition of AGT expression.

[0408] In yet another aspect, the present invention provides use of an antisense polynucleotide agent of the invention targeting an AGT gene or a pharmaceutical composition comprising an antisense polynucleotide agent targeting an AGT gene in the manufacture of a medicament for treating a subject, e.g., a subject that would benefit from a reduction and/or inhibition of AGT expression, such as a subject having a disorder that would benefit from reduction in AGT expression, e.g., an AGT-associated disease, e.g., hypertension.

[0409] In another aspect, the present invention provides uses of an antisense polynucleotide agent of the invention targeting an AGT gene or a pharmaceutical composition comprising an antisense polynucleotide agent targeting an AGT gene in the manufacture of a medicament for use in combination with an additional therapeutic agent for treatment of the AGT-associated diseases, such as a diuretic, an angiotensin converting enzyme (ACE) inhibitor, an angiotensin II receptor antagonist, a beta-blocker, a vasodialator, a calcium channel blocker, an aldosterone antagonist, an alpha₂-agonist, a renin inhibitor, an alpha-blocker, a peripheral acting adrenergic agent, a selective D1 receptor partial agonist, a nonselective alpha-adrenergic antagonist, a synthetic, steroidal antimineralocorticoid agent, or a combination of any of the foregoing, and a hypertension therapeutic agent formulated as a combination of agents, for treating a subject, e.g., a subject that would benefit from a reduction and/or inhibition of AGT expression, e.g., an AGT-associated disease, e.g., hypertension.

[0410] In another aspect, the invention provides uses of an antisense polynucleotide agent of the invention for preventing at least one symptom in a subject suffering from a disorder that would benefit from a reduction and/or inhibition of AGT expression, such as an AGT-associated disease, e.g., hypertension.

[0411] In yet another aspect, the invention provides uses of an antisense polynucleotide agent of the invention, and an additional therapeutic agent for treatment of the AGT-associated diseases, such as a diuretic, an angiotensin converting enzyme (ACE) inhibitor, an angiotensin II receptor antagonist, a beta-blocker, a vasodialator, a calcium channel blocker, an aldosterone antagonist, an alpha₂-agonist, a renin inhibitor, an alpha-blocker, a peripheral acting adrenergic agent, a selective D1 receptor partial agonist, a nonselective alpha-adrenergic antagonist, a synthetic, steroidal antimineralocorticoid agent, or a combination of any of the foregoing, and a hypertension therapeutic agent formulated as a combination of agents, for preventing at least one symptom in a subject suffering from a disorder that would benefit from a reduction and/or inhibition of AGT, such as and AGT-associated disease, e.g., hypertension.

[0412] In a further aspect, the present invention provides uses of an antisense polynucleotide agent of the invention in the manufacture of a medicament for preventing at least one symptom in a subject suffering from a disorder that would benefit from a reduction and/or inhibition of AGT expression, such as an AGT-associated disease, e.g., hypertension.

[0413] In a further aspect, the present invention provides uses of an antisense polynucleotide agent of the invention in the manufacture of a medicament for use in combination with an additional therapeutic agent, such as a diuretic, an angiotensin converting enzyme (ACE) inhibitor, an angiotensin II receptor antagonist, a beta-blocker, a vasodialator, a calcium channel blocker, an aldosterone antagonist, an alpha₂-agonist, a renin inhibitor, an alpha-blocker, a peripheral acting adrenergic agent, a selective D1 receptor partial agonist, a nonselective alpha-adrenergic antagonist, a synthetic, steroidal antimineralocorticoid agent, or a combination of any of the foregoing, and a hypertension therapeutic agent formulated as a combination of agents, for preventing at least one symptom in a subject suffering from a disorder that would benefit from a reduction and/or inhibition of AGT expression, such as an AGT-associated disease, e.g., hypertension.

[0414] In one embodiment, an antisense polynucleotide agent targeting AGT is administered to a subject having an AGT-associated disease such that AGT levels, e.g., in a cell, tissue, blood, urine or other tissue or fluid of the subject are reduced by at least about 10%, 11%, 12%, 13%, 14%, 15%, 16%, 17%, 18%, 19%, 20%, 21%, 22%, 23%, 24%, 25%, 26%, 27%, 28%, 29%, 30%, 31%, 32%, 33%, 34%, 35%, 36%, 37%, 38%, 39%, 40%, 41%, 42%, 43%, 44%, 45%, 46%, 47%, 48%, 49%, 50%, 51%, 52%, 53%, 54%, 55%, 56%, 57%, 58%, 59%, 60%, 61%, 62%, 62%, 64%, 65%, 66%, 67%, 68%, 69%, 70%, 71%, 72%, 73%, 74%, 75%, 76%, 77%, 78%, 79%, 80%, 81%, 82%, 83%, 84%, 85%, 86%, 87%, 88%, 89%, 90%, 91%, 92%, 93%, 94%, 95%, 96%, 97%, 98%, or at least about 99% or more and, subsequently, an additional therapeutic (as described below) is administered to the subject.

[0415] The additional therapeutic agent for the treatment of an AGT-associated disease may be, for example, a diuretic, an angiotensin converting enzyme (ACE) inhibitor, an angiotensin II receptor antagonist, a beta-blocker, a vasodialator, a calcium channel blocker, an aldosterone antagonist, an alpha₂-agonist, a renin inhibitor, an alpha-blocker, a peripheral acting adrenergic agent, a selective D1 receptor partial agonist, a nonselective alpha-adrenergic antagonist, a synthetic, steroidal antimineralocorticoid agent. In certain embodiments, the additional agent is safe for use in pregnant women. In certain embodiments, the additional agent does not substantially traverse the placenta, i.e., does not traverse the placenta in sufficient amounts to harm the fetus.

[0416] In exemplary methods of the invention for treating an AGT-associated disease, e.g., hypertension, an antisense polynucleotide agent targeting AGT is administered (e.g., subcutaneously) to the subject first, such that the AGT levels in the subject are reduced (e.g., by at least about 20%, 21%, 22%, 23%, 24%, 25%, 26%, 27%, 28%, 29%, 30%, 31%, 32%, 33%, 34%, 35%, 36%, 37%, 38%, 39%, 40%, 41%, 42%, 43%, 44%, 45%, 46%, 47%, 48%, 49%, 50%, 51%, 52%, 53%, 54%, 55%, 56%, 57%, 58%, 59%, 60%, 61%, 62%, 62%, 64%, 65%, 66%, 67%, 68%, 69%, 70%, 71%, 72%, 73%, 74%, 75%, 76%, 77%, 78%, 79%, 80%, 81%, 82%, 83%, 84%, 85%, 86%, 87%, 88%, 89%, 90%, 91%, 92%, 93%, 94%, 95%, 96%, 97%, 98%, or at least about 99% or more) and subsequently for treatment of the AGT-associated diseases is administered at doses lower than the ones described in the product insert for the agent. In certain embodiments, the agent for treatment of the AGT-associated disease can be administered at a sufficiently low dose to decrease side effects to an acceptable level. In certain embodiments, the agent for treatment of the AGT-associated disease can be administered at a sufficiently low dose to be acceptable for administration to a pregnant woman.

[0417] The methods and uses of the invention include administering a composition described herein such that expression of the target AGT gene is decreased, such as for about 1, 2, 3, 4, 5, 6, 7, 8, 12, 16, 18, 24, 28, 32, 36, 40, 44, 48, 52, 56, 60, 64, 68, 72, 76, or about 80 hours. In certain embodiments, expression of the target AGT gene is decreased for an extended duration, e.g., at least about two, three, four, five, six, seven days or more, e.g., about one week, two weeks, three weeks, or about four weeks or longer.

[0418] Administration of the antisense polynucleotide agent according to the methods and uses of the invention may result in a reduction of the severity, signs, symptoms, and/or markers of such diseases or disorders in a patient with an AGT-associated disease. By “reduction” in this context is meant a statistically significant decrease in such level. The reduction can be, for example, at least about 5%, 10%, 15%, 20%, 25%, 30%, 35%, 40%, 45%, 50%, 55%, 60%, 65%, 70%, 75%, 80%, 85%, 90%, 95%, or about 100%.

[0419] Efficacy of treatment or prevention of disease can be assessed, for example by measuring disease progression, disease remission, symptom severity, reduction in pain, quality of life, dose of a medication required to sustain a treatment effect, level of a disease marker or any other measurable parameter appropriate for a given disease being treated or targeted for prevention. It is well within the ability of one skilled in the art to monitor efficacy of treatment or prevention by measuring any one of such parameters, or any combination of parameters. For example, efficacy of treatment of an AGT-associated disorder may be assessed, for example, by periodic monitoring of blood pressurelevels. Comparisons of the later readings with the initial readings provide a physician an indication of whether the treatment is effective. It is well within the ability of one skilled in the art to monitor efficacy of treatment or prevention by measuring such a parameter, or any combination of parameters. In connection with the administration of an antisense polynucleotide agent targeting AGT or pharmaceutical composition thereof, “effective against” an AGT-associated disease indicates that administration in a clinically appropriate manner results in a beneficial effect for at least a statistically significant fraction of patients, such as improvement of symptoms, a cure, a reduction in disease, extension of life, improvement in quality of life, or other effect generally recognized as positive by medical doctors familiar with treating an AGT-associated disease and the related causes.

[0420] A treatment or preventive effect is evident when there is a statistically significant improvement in one or more parameters of disease status, or by a failure to worsen or to develop symptoms where they would otherwise be anticipated. As an example, a favorable change of at least 10% in a measurable parameter of disease, and preferably at least 20%, 30%, 40%, 50% or more can be indicative of effective treatment. Efficacy for a given antisense polynucleotide agent drug or formulation of that drug can also be judged using an experimental animal model for the given disease as known in the art. When using an experimental animal model, efficacy of treatment is evidenced when a statistically significant reduction in a marker or symptom is observed.

[0421] Any positive change resulting in e.g., lessening of severity of disease measured using the appropriate scale, represents adequate treatment using an antisense polynucleotide agent or antisense polynucleotide agent formulation as described herein.

[0422] Subjects can be administered a therapeutic amount of antisense polynucleotide agent, such as about 0.01 mg/kg, 0.02 mg/kg, 0.03 mg/kg, 0.04 mg/kg, 0.05 mg/kg, 0.1 mg/kg, 0.15 mg/kg, 0.2 mg/kg, 0.25 mg/kg, 0.3 mg/kg, 0.35 mg/kg, 0.4 mg/kg, 0.45 mg/kg, 0.5 mg/kg, 0.55 mg/kg, 0.6 mg/kg, 0.65 mg/kg, 0.7 mg/kg, 0.75 mg/kg, 0.8 mg/kg, 0.85 mg/kg, 0.9 mg/kg, 0.95 mg/kg, 1.0 mg/kg, 1.1 mg/kg, 1.2 mg/kg, 1.3 mg/kg, 1.4 mg/kg, 1.5 mg/kg, 1.6 mg/kg, 1.7 mg/kg, 1.8 mg/kg, 1.9 mg/kg, 2.0 mg/kg, 2.1 mg/kg, 2.2 mg/kg, 2.3 mg/kg, 2.4 mg/kg, 2.5 mg/kg, 2.6 mg/kg, 2.7 mg/kg, 2.8 mg/kg, 2.9 mg/kg, 3.0 mg/kg, 3.1 mg/kg, 3.2 mg/kg, 3.3 mg/kg, 3.4 mg/kg, 3.5 mg/kg, 3.6 mg/kg, 3.7 mg/kg, 3.8 mg/kg, 3.9 mg/kg, 4.0 mg/kg, 4.1 mg/kg, 4.2 mg/kg, 4.3 mg/kg, 4.4 mg/kg, 4.5 mg/kg, 4.6 mg/kg, 4.7 mg/kg, 4.8 mg/kg, 4.9 mg/kg, 5.0 mg/kg, 5.1 mg/kg, 5.2 mg/kg, 5.3 mg/kg, 5.4 mg/kg, 5.5 mg/kg, 5.6 mg/kg, 5.7 mg/kg, 5.8 mg/kg, 5.9 mg/kg, 6.0 mg/kg, 6.1 mg/kg, 6.2 mg/kg, 6.3 mg/kg, 6.4 mg/kg, 6.5 mg/kg, 6.6 mg/kg, 6.7 mg/kg, 6.8 mg/kg, 6.9 mg/kg, 7.0 mg/kg, 7.1 mg/kg, 7.2 mg/kg, 7.3 mg/kg, 7.4 mg/kg, 7.5 mg/kg, 7.6 mg/kg, 7.7 mg/kg, 7.8 mg/kg, 7.9 mg/kg, 8.0 mg/kg, 8.1 mg/kg, 8.2 mg/kg, 8.3 mg/kg, 8.4 mg/kg, 8.5 mg/kg, 8.6 mg/kg, 8.7 mg/kg, 8.8 mg/kg, 8.9 mg/kg, 9.0 mg/kg, 9.1 mg/kg, 9.2 mg/kg, 9.3 mg/kg, 9.4 mg/kg, 9.5 mg/kg, 9.6 mg/kg, 9.7 mg/kg, 9.8 mg/kg, 9.9 mg/kg, 9.0 mg/kg, 10 mg/kg, 15 mg/kg, 20 mg/kg, 25 mg/kg, 30 mg/kg, 35 mg/kg, 40 mg/kg, 45 mg/kg, or about 50 mg/kg. Values and ranges intermediate to the recited values are also intended to be part of this invention.

[0423] In certain embodiments, for example, when a composition of the invention comprises a antisense polynucleotide agent as described herein and a lipid, subjects can be administered a therapeutic amount of antisense polynucleotide agent, such as about 0.01 mg/kg to about 5 mg/kg, about 0.01 mg/kg to about 10 mg/kg, about 0.05 mg/kg to about 5 mg/kg, about 0.05 mg/kg to about 10 mg/kg, about 0.1 mg/kg to about 5 mg/kg, about 0.1 mg/kg to about 10 mg/kg, about 0.2 mg/kg to about 5 mg/kg, about 0.2 mg/kg to about 10 mg/kg, about 0.3 mg/kg to about 5 mg/kg, about 0.3 mg/kg to about 10 mg/kg, about 0.4 mg/kg to about 5 mg/kg, about 0.4 mg/kg to about 10 mg/kg, about 0.5 mg/kg to about 5 mg/kg, about 0.5 mg/kg to about 10 mg/kg, about 1 mg/kg to about 5 mg/kg, about 1 mg/kg to about 10 mg/kg, about 1.5 mg/kg to about 5 mg/kg, about 1.5 mg/kg to about 10 mg/kg, about 2 mg/kg to about about 2.5 mg/kg, about 2 mg/kg to about 10 mg/kg, about 3 mg/kg to about 5 mg/kg, about 3 mg/kg to about 10 mg/kg, about 3.5 mg/kg to about 5 mg/kg, about 4 mg/kg to about 5 mg/kg, about 4.5 mg/kg to about 5 mg/kg, about 4 mg/kg to about 10 mg/kg, about 4.5 mg/kg to about 10 mg/kg, about 5 mg/kg to about 10 mg/kg, about 5.5 mg/kg to about 10 mg/kg, about 6 mg/kg to about 10 mg/kg, about 6.5 mg/kg to about 10 mg/kg, about 7 mg/kg to about 10 mg/kg, about 7.5 mg/kg to about 10 mg/kg, about 8 mg/kg to about 10 mg/kg, about 8.5 mg/kg to about 10 mg/kg, about 9 mg/kg to about 10 mg/kg, or about 9.5 mg/kg to about 10 mg/kg. Values and ranges intermediate to the recited values are also intended to be part of this invention.

[0424] For example, the antisense polynucleotide agent may be administered at a dose of about 0.1, 0.2, 0.3, 0.4, 0.5, 0.6, 0.7, 0.8, 0.9, 1, 1.1, 1.2, 1.3, 1.4, 1.5, 1.6, 1.7, 1.8, 1.9, 2, 2.1, 2.2, 2.3, 2.4, 2.5, 2.6, 2.7, 2.8, 2.9, 3, 3.1, 3.2, 3.3, 3.4, 3.5, 3.6, 3.7, 3.8, 3.9, 4, 4.1, 4.2, 4.3, 4.4, 4.5, 4.6, 4.7, 4.8, 4.9, 5, 5.1, 5.2, 5.3, 5.4, 5.5, 5.6, 5.7, 5.8, 5.9, 6, 6.1, 6.2, 6.3, 6.4, 6.5, 6.6, 6.7, 6.8, 6.9, 7, 7.1, 7.2, 7.3, 7.4, 7.5, 7.6, 7.7, 7.8, 7.9, 8, 8.1, 8.2, 8.3, 8.4, 8.5, 8.6, 8.7, 8.8, 8.9, 9, 9.1, 9.2, 9.3, 9.4, 9.5, 9.6, 9.7, 9.8, 9.9, or about 10 mg/kg. Values and ranges intermediate to the recited values are also intended to be part of this invention.

[0425] In other embodiments, for example, when a composition of the invention comprises a antisense polynucleotide agent as described herein and an N-acetylgalactosamine, subjects can be administered a therapeutic amount of antisense polynucleotide agent, such as a dose of about 0.1 to about 50 mg/kg, about 0.25 to about 50 mg/kg, about 0.5 to about 50 mg/kg, about 0.75 to about 50 mg/kg, about 1 to about 50 mg/mg, about 1.5 to about 50 mg/kb, about 2 to about 50 mg/kg, about 2.5 to about 50 mg/kg, about 3 to about 50 mg/kg, about 3.5 to about 50 mg/kg, about 4 to about 50 mg/kg, about 4.5 to about 50 mg/kg, about 5 to about 50 mg/kg, about 7.5 to about 50 mg/kg, about 10 to about 50 mg/kg, about 15 to about 50 mg/kg, about 20 to about 50 mg/kg, about 20 to about 50 mg/kg, about 25 to about 50 mg/kg, about 25 to about 50 mg/kg, about 30 to about 50 mg/kg, about 35 to about 50 mg/kg, about 40 to about 50 mg/kg, about 45 to about 50 mg/kg, about 0.1 to about 45 mg/kg, about 0.25 to about 45 mg/kg, about 0.5 to about 45 mg/kg, about 0.75 to about 45 mg/kg, about 1 to about 45 mg/mg, about 1.5 to about 45 mg/kb, about 2 to about 45 mg/kg, about 2.5 to about 45 mg/kg, about 3 to about 45 mg/kg, about 3.5 to about 45 mg/kg, about 4 to about 45 mg/kg, about 4.5 to about 45 mg/kg, about 5 to about 45 mg/kg, about 7.5 to about 45 mg/kg, about 10 to about 45 mg/kg, about 15 to about 45 mg/kg, about 20 to about 45 mg/kg, about 20 to about 45 mg/kg, about 25 to about 45 mg/kg, about 25 to about 45 mg/kg, about 30 to about 45 mg/kg, about 35 to about 45 mg/kg, about 40 to about 45 mg/kg, about 0.1 to about 40 mg/kg, about 0.25 to about 40 mg/kg, about 0.5 to about 40 mg/kg, about 0.75 to about 40 mg/kg, about 1 to about 40 mg/mg, about 1.5 to about 40 mg/kb, about 2 to about 40 mg/kg, about 2.5 to about 40 mg/kg, about 3 to about 40 mg/kg, about 3.5 to about 40 mg/kg, about 4 to about 40 mg/kg, about 4.5 to about 40 mg/kg, about 5 to about 40 mg/kg, about 7.5 to about 40 mg/kg, about 10 to about 40 mg/kg, about 15 to about 40 mg/kg, about 20 to about 40 mg/kg, about 20 to about 40 mg/kg, about 25 to about 40 mg/kg, about 25 to about 40 mg/kg, about 30 to about 40 mg/kg, about 35 to about 40 mg/kg, about 0.1 to about 30 mg/kg, about 0.25 to about 30 mg/kg, about 0.5 to about 30 mg/kg, about 0.75 to about 30 mg/kg, about 1 to about 30 mg/mg, about 1.5 to about 30 mg/kb, about 2 to about 30 mg/kg, about 2.5 to about 30 mg/kg, about 3 to about 30 mg/kg, about 3.5 to about 30 mg/kg, about 4 to about 30 mg/kg, about 4.5 to about 30 mg/kg, about 5 to about 30 mg/kg, about 7.5 to about 30 mg/kg, about 10 to about 30 mg/kg, about 15 to about 30 mg/kg, about 20 to about 30 mg/kg, about 20 to about 30 mg/kg, about 25 to about 30 mg/kg, about 0.1 to about 20 mg/kg, about 0.25 to about 20 mg/kg, about 0.5 to about 20 mg/kg, about 0.75 to about 20 mg/kg, about 1 to about 20 mg/mg, about 1.5 to about 20 mg/kb, about 2 to about 20 mg/kg, about 2.5 to about 20 mg/kg, about 3 to about 20 mg/kg, about 3.5 to about 20 mg/kg, about 4 to about 20 mg/kg, about 4.5 to about 20 mg/kg, about 5 to about 20 mg/kg, about 7.5 to about 20 mg/kg, about 10 to about 20 mg/kg, or about 15 to about 20 mg/kg. In one embodiment, when a composition of the invention comprises a antisense polynucleotide agent as described herein and an N-acetylgalactosamine, subjects can be administered a therapeutic amount of about 10 to about 30 mg/kg of antisense polynucleotide agent. Values and ranges intermediate to the recited values are also intended to be part of this invention.

[0426] For example, subjects can be administered a therapeutic amount of antisense polynucleotide agent, such as about 0.1, 0.2, 0.3, 0.4, 0.5, 0.6, 0.7, 0.8, 0.9, 1, 1.1, 1.2, 1.3, 1.4, 1.5, 1.6, 1.7, 1.8, 1.9, 2, 2.1, 2.2, 2.3, 2.4, 2.5, 2.6, 2.7, 2.8, 2.9, 3, 3.1, 3.2, 3.3, 3.4, 3.5, 3.6, 3.7, 3.8, 3.9, 4, 4.1, 4.2, 4.3, 4.4, 4.5, 4.6, 4.7, 4.8, 4.9, 5, 5.1, 5.2, 5.3, 5.4, 5.5, 5.6, 5.7, 5.8, 5.9, 6, 6.1, 6.2, 6.3, 6.4, 6.5, 6.6, 6.7, 6.8, 6.9, 7, 7.1, 7.2, 7.3, 7.4, 7.5, 7.6, 7.7, 7.8, 7.9, 8, 8.1, 8.2, 8.3, 8.4, 8.5, 8.6, 8.7, 8.8, 8.9, 9, 9.1, 9.2, 9.3, 9.4, 9.5, 9.6, 9.7, 9.8, 9.9, 10, 10.5, 11, 11.5, 12, 12.5, 13, 13.5, 14, 14.5, 15, 15.5, 16, 16.5, 17, 17.5, 18, 18.5, 19, 19.5, 20, 20.5, 21, 21.5, 22, 22.5, 23, 23.5, 24, 24.5, 25, 25.5, 26, 26.5, 27, 27.5, 28, 28.5, 29, 29.5, 30, 31, 32, 33, 34, 34, 35, 36, 37, 38, 39, 40, 41, 42, 43, 44, 45, 46, 47, 48, 49, or about 50 mg/kg. Values and ranges intermediate to the recited values are also intended to be part of this invention.

[0427] The antisense polynucleotide agent can be administered by intravenous infusion over a period of time, such as over a 5, 6, 7, 8, 9, 10, 11, 12, 13, 14, 15, 16, 17, 18, 19, 20, 21, 22, 23, 24, or about a 25 minute period. The administration may be repeated, for example, on a regular basis, such as weekly, biweekly (i.e., every two weeks) for one month, two months, three months, four months or longer. After an initial treatment regimen, the treatments can be administered on a less frequent basis. For example, after administration weekly or biweekly for three months, administration can be repeated once per month, for six months or a year or longer.

[0428] Administration of the antisense polynucleotide agent can reduce AGT levels, e.g., in a cell, tissue, blood, urine or other compartment of the patient by at least about 5%, 6%, 7%, 8%, 9%, 10%, 11%, 12%, 13%, 14%, 15%, 16%, 17%, 18%, 19%, 20%, 21%, 22%, 23%, 24%, 25%, 26%, 27%, 28%, 29%, 30%, 31%, 32%, 33%, 34%, 35%, 36%, 37%, 38%, 39%, 40%, 41%, 42%, 43%, 44%, 45%, 46%, 47%, 48%, 49%, 50%, 51%, 52%, 53%, 54%, 55%, 56%, 57%, 58%, 59%, 60%, 61%, 62%, 63%, 64%, 65%, 66%, 67%, 68%, 69%, 70%, 71%, 72%, 73%, 74%, 75%, 76%, 77%, 78%, 79%, 80%, 81%, 82%, 83%, 84%, 85%, 86%, 87%, 88%, 89%, 90%, 91%, 92%, 93%, 94%, 95%, 96%, 97%, 98%, or at least about 99% or more.

[0429] Before administration of a full dose of the antisense polynucleotide agent, patients can be administered a smaller dose, such as a 5% infusion, and monitored for adverse effects, such as an allergic reaction. In another example, the patient can be monitored for unwanted immunostimulatory effects, such as increased cytokine (e.g., TNF-alpha or INF-alpha) levels.

[0430] Owing to the inhibitory effects on AGT expression, a composition according to the invention or a pharmaceutical composition prepared therefrom can enhance the quality of life.

[0431] An antisense polynucleotide agent of the invention may be administered in “naked” form, or as a “free antisense polynucleotide agent.” A naked antisense polynucleotide agent is administered in the absence of a pharmaceutical composition. The naked antisense polynucleotide agent may be in a suitable buffer solution. The buffer solution may comprise acetate, citrate, prolamine, carbonate, or phosphate, or any combination thereof. In one embodiment, the buffer solution is phosphate buffered saline (PBS). The pH and osmolarity of the buffer solution containing the antisense polynucleotide agent can be adjusted such that it is suitable for administering to a subject.

[0432] Alternatively, an antisense polynucleotide agent of the invention may be administered as a pharmaceutical composition, such as an antisense polynucleotide agent liposomal formulation.

[0433] Subjects that would benefit from a reduction and/or inhibition of AGT gene expression are those having an AGT-associated disease or disorder as described herein. In certain embodiments, a subject having an AGT-associated disease has hypertension, e.g., borderline hypertension (also known as prehypertension), primary hypertension (also known as essential hypertension or idiopathic hypertension), secondary hypertension (also known as inessential hypertension), hypertensive emergency, hypertensive urgency, pregnancy-associated hypertension (e.g., preeclampsia and eclampsia), resistant hypertension, paroxysmal hypertension, renovascular hypertension (also known as renal hypertension), Goldblatt hypertension, ocular hypertension, pulmonary hypertension, portal hypertension, systemic venous hypertension, systolic hypertension, labile hypertension. In certain embodiments, the hypertension is pregnancy-associated hypertension. In certain embodiments, a subject having an AGT-associated disease has hypertensive heart disease. In certain embodiments, a subject having an AGT-associated disease has hypertensive nephropathy. In certain embodiments, a subject having an AGT-associated disease has atherosclerosis. In certain embodiments, a subject having anAGT-associated disease has arteriosclerosis. In certain embodiments, a subject having an AGT-associated disease has chronic kidney disease. In certain embodiments, a subject having an AGT-associated disease has glomerulosclerosis. In certain embodiments, a subject having an AGT disease has coarctation of the aorta. In certain embodiments, a subject having an AGT-associated disease has aortic aneurism In certain embodiments, a subject having an AGT-associated disease has ventricular fibrosis. In certain embodiments, a subject having an AGT-associated disease has Cushing’s syndrome. In certain embodiments, a subject having an AGT-associated disease has a glucocorticoid excess state such as chronic steroid therapy, pheochromocytoma, reninoma, primary aldosteronism and other mineralocorticoid excess states. In certain embodiments, a subject having an AGT-associated disease has sleep apnea. In certain embodiments, a subject having an AGT-associated disease has thyroid/parathyroid disease. In certain embodiments, a subject having an AGT-associated disease has heart failure (e.g., left ventricular systolic dysfunction). In certain embodiments, a subject having an AGT-associated disease has had a myocardial infarction. In certain embodiments, a subject having an AGT-associated disease has had a stroke. In certain embodiments, a subject having an AGT-associated disease has diabetes mellitus (e.g., diabetic nephropathy). In certain embodiments, a subject having an AGT-associated disease has diabetes mellitus (e.g., diabetic nephropathy). In certain embodiments, a subject having an AGT-associated disease has renal failure, e.g., chronic renal failure . In certain embodiments, a subject having an AGT-associated disease has systemic sclerosis (e.g., scleroderma renal crisis). In certain embodiments, a subject having an AGT-associated disease has secondary hyptertension. In certain embodiments, a subject having an AGT-associated disease has accelerated hyptertension. In certain embodiments, a subject having an AGT-associated disease has malignant hyptertension. In certain embodiments, a subject having an AGT-associated disease has hyptertensive urgency.

[0434] In certain embodiments, has preganancy-associated hyptertension includes chronic hypertension of pregnancy, gestational hypertension, preeclampsia, eclampsia, preeclampsia superimposed on chronic hypertension, HELLP syndrome, and gestational hypertension (also known as transient hypertension of pregnancy, chronic hypertension identified in the latter half of pregnancy, and pregnancy-induced hypertension (PIH)). A subject having “chronic hypertension of pregnancy” is one having a blood pressure exceeding 140/90 mm Hg before pregnancy or before 20 weeks’ gestation. “Gestational hypertension” or “pregnancy-induced hypertension” refers to hypertension with onset in the latter part of pregnancy (>20 weeks’ gestation) without any other features of preeclampsia, and followed by normalization of the blood pressure postpartum. “Mild preeclampsia” is defined as the presence of hypertension (blood pressure ≥140/90 mm Hg) on two occasions, at least six hours apart, but without evidence of end-organ damage, in a woman who was normotensive before 20 weeks’ gestation. In a subject with preexisting essential hypertension, preeclampsia is diagnosed if systolic blood pressure has increased by 30 mm Hg or if diastolic blood pressure has increased by 15 mm Hg. “Severe preeclampsia” is defined as the presence of 1 of the following symptoms or signs in the presence of preeclampsia; asystolic blood pressure of 160 mm Hg or higher or diastolic blood pressure of 110 mm Hg or higher on two occasions at least six hours apart; proteinuria of more than 5 g in a 24-hour collection or more than 3+ on two random urine samples collected at least four hours apart, pulmonary edema or cyanosis, oliguria (< 400 mL in 24 hours), persistent headaches, epigastric pain and/or impaired liver function, thrombocytopenia, oligohydramnios, decreased fetal growth, or placental abruption. “Eclampsia” is defined as seizures that cannot be attributable to other causes in a woman with preeclampsia. “HELLP syndrome” (also known as edema-proteinuria-hypertension gestosis type B) is Hemolysis, Elevated Liver enzyme levels, and Low Platelet levels in a pregnant subject.

[0435] In certain embodiments, an angiotensinogen-associated disease is resistant hypertension. “Resistant hypertension” is blood pressure that remains above goal (e.g., 140/90 mmHg) in spite of concurrent use of three antihypertensive agents of different classes, one of which is a thiazide diuretic. Subjects whose blood pressure is controlled with four or more medications are also considered to have resistant hypertension.

[0436] Treatment of a subject that would benefit from a reduction and/or inhibition of AGT gene expression includes therapeutic and prophylactic treatment (e.g., the subject has one or more risk factors for pregnancy-associated hypertension).

[0437] The invention further provides methods and uses of an antisense polynucleotide agent or a pharmaceutical composition thereof (including methods and uses of an antisense polynucleotide agent or a pharmaceutical composition comprising an antisense polynucleotide agent and an for treatment of the AGT-associated diseases) for treating a subject that would benefit from reduction and/or inhibition of AGT expression, e.g., a subject having an AGT-associated disease, in combination with other pharmaceuticals and/or other therapeutic methods, e.g., with known pharmaceuticals and/or known therapeutic methods, such as, for example, those which are currently employed for treating these disorders. For example, in certain embodiments, an antisense polynucleotide agent targeting AGT is administered in combination with, e.g., an agent useful in treating an AGT-associated disease as described elsewhere herein.

[0438] For example, additional therapeutics and therapeutic methods suitable for treating a subject that would benefit from reducton in AGT expression, e.g., a subject having an AGT-associated disease, include a diuretic, an angiotensin converting enzyme (ACE) inhibitor, an angiotensin II receptor antagonist, a beta-blocker, a vasodialator, a calcium channel blocker, an aldosterone antagonist, an alpha₂-agonist, a renin inhibitor, an alpha-blocker, a peripheral acting adrenergic agent, a selective D1 receptor partial agonist, a nonselective alpha-adrenergic antagonist, a synthetic, steroidal antimineralocorticoid agent, or a combination of any of the foregoing, and a hypertension therapeutic agent formulated as a combination of agents. In certain embodiments, the agent is safe for use in pregnant women.

[0439] The antisense polynucleotide agent (and/or agent(s) for treatment of the AGT-associated disease) and an additional therapeutic agent and/or treatment may be administered at the same time and/or in the same combination, e.g., parenterally, or the additional therapeutic agent can be administered as part of a separate composition or at separate times and/or by another method known in the art or described herein.

[0440] The present invention also provides methods of using an antisense polynucleotide agent of the invention and/or a composition containing an antisense polynucleotide agent of the invention to reduce and/or inhibit AGT expression in a cell. In other aspects, the present invention provides an antisense polynucleotide agent of the invention and/or a composition comprising an antisense polynucleotide agent of the invention for use in reducing and/or inhibiting AGT expression in a cell. In yet other aspects, use of an antisense polynucleotide agent of the invention and/or a composition comprising an antisense polynucleotide agent of the invention for the manufactuire of a medicament for reducing and/or inhibiting AGT expression in a cell are provided.

[0441] The methods and uses include contacting the cell with an antisense polynucleotide agent, e.g., a antisense polynucleotide agent, of the invention and maintaining the cell for a time sufficient to obtain antisense inhibition of a AGT gene, thereby inhibiting expression of the AGT gene in the cell.

[0442] Reduction in gene expression can be assessed by any methods known in the art. For example, a reduction in the expression of AGT may be determined by determining the mRNA expression level of AGT using methods routine to one of ordinary skill in the art, e.g., northern blotting, qRT-PCR, by determining the protein level of AGT using methods routine to one of ordinary skill in the art, such as western blotting, immunological techniques, flow cytometry methods, ELISA, and/or by determining a biological activity of AGT, such as blood pressure monitoring, and/or by determining the biological activity of one or more molecules associated with RAAS system activation or dysregulation.

[0443] In the methods and uses of the invention the cell may be contacted in vitro or in vivo, i.e., the cell may be within a subject. In embodiments of the invention in which the cell is within a subject, the methods may include further contacting the cell with an agent for treatment of the AGT-associated disease.

[0444] A cell suitable for treatment using the methods of the invention may be any cell that expresses an AGT gene. A cell suitable for use in the methods and uses of the invention may be a mammalian cell, e.g., a primate cell (such as a human cell or a non-human primate cell, e.g., a monkey cell or a chimpanzee cell), a non-primate cell (such as a cow cell, a pig cell, a camel cell, a llama cell, a horse cell, a goat cell, a rabbit cell, a sheep cell, a hamster, a guinea pig cell, a cat cell, a dog cell, a rat cell, a mouse cell, a lion cell, a tiger cell, a bear cell, or a buffalo cell), a bird cell (e.g., a duck cell or a goose cell), or a whale cell. In one embodiment, the cell is a human cell, e.g., a human liver cell.

[0445] AGT expression may be inhibited in the cell by at least about 5%, 6%, 7%, 8%, 9%, 10%, 11%, 12%, 13%, 14%, 15%, 16%, 17%, 18%, 19%, 20%, 21%, 22%, 23%, 24%, 25%, 26%, 27%, 28%, 29%, 30%, 31%, 32%, 33%, 34%, 35%, 36%, 37%, 38%, 39%, 40%, 41%, 42%, 43%, 44%, 45%, 46%, 47%, 48%, 49%, 50%, 51%, 52%, 53%, 54%, 55%, 56%, 57%, 58%, 59%, 60%, 61%, 62%, 63%, 64%, 65%, 66%, 67%, 68%, 69%, 70%, 71%, 72%, 73%, 74%, 75%, 76%, 77%, 78%, 79%, 80%, 81%, 82%, 83%, 84%, 85%, 86%, 87%, 88%, 89%, 90%, 91%, 92%, 93%, 94%, 95%, 96%, 97%, 98%, 99%, or about 100%.

[0446] The in vivo methods and uses of the invention may include administering to a subject a composition containing an antisense polynucleotide agent, where the antisense polynucleotide agent includes a nucleotide sequence that is complementary to at least a part of an RNA transcript of the AGT gene of the mammal to be treated. When the organism to be treated is a mammal such as a human, the composition can be administered by any means known in the art including, but not limited to subcutaneous, intravenous, oral, intraperitoneal, or parenteral routes, including intracranial (e.g., intraventricular, intraparenchymal and intrathecal), intramuscular, transdermal, airway (aerosol), nasal, rectal, and topical (including buccal and sublingual) administration. In certain embodiments, the compositions are administered by subcutaneous or intravenous infusion or injection.

[0447] In some embodiments, the administration is via a depot injection. A depot injection may release the antisense polynucleotide agent in a consistent way over a prolonged time period. Thus, a depot injection may reduce the frequency of dosing needed to obtain a desired effect, e.g., a desired inhibition of AGT, or a therapeutic or prophylactic effect. A depot injection may also provide more consistent serum concentrations. Depot injections may include subcutaneous injections or intramuscular injections. In preferred embodiments, the depot injection is a subcutaneous injection.

[0448] In some embodiments, the administration is via a pump. The pump may be an external pump or a surgically implanted pump. In certain embodiments, the pump is a subcutaneously implanted osmotic pump. In other embodiments, the pump is an infusion pump. An infusion pump may be used for intravenous, subcutaneous, arterial, or epidural infusions. In preferred embodiments, the infusion pump is a subcutaneous infusion pump. In other embodiments, the pump is a surgically implanted pump that delivers the antisense polynucleotide agent to the liver.

[0449] The mode of administration may be chosen based upon whether local or systemic treatment is desired and based upon the area to be treated. The route and site of administration may be chosen to enhance targeting.

[0450] In one aspect, the present invention also provides methods for inhibiting the expression of an AGT gene in a mammal, e.g., a human. The present invention also provides a composition comprising an antisense polynucleotide agen that targets an AGT gene in a cell of a mammal for use in inhibiting expression of the AGT gene in the mammal. In another aspect, the present invention provides use of an antisense polynucleotide agent that targets an AGT gene in a cell of a mammal in the manufacture of a medicament for inhibiting expression of the AGT gene in the mammal.

[0451] The methods and uses include administering to the mammal, e.g., a human, a composition comprising an antisense polynucleotide agent that targets an AGT gene in a cell of the mammal and maintaining the mammal for a time sufficient to obtain antisense inhibition of the mRNA transcript of the AGT gene, thereby inhibiting expression of the AGT gene in the mammal. In some embodiment, the methods further comprise administering an agent for treatment of the AGT-associated disease to the subject.

[0452] Reduction in gene expression can be assessed by any methods known it the art and by methods, e.g. qRT-PCR, described herein. Reduction in protein production can be assessed by any methods known it the art and by methods, e.g., ELISA or western blotting, described herein. In one embodiment, a puncture liver biopsy sample serves as the tissue material for monitoring the reduction in AGT gene and/or protein expression. In another embodiment, a blood sample serves as the tissue material for monitoring the reduction in AGT gene and/or protein expression. In other embodiments, inhibition of the expression of an AGT gene is monitored indirectly by, for example, determining the expression and/or activity of a gene in the RAAS pathway (see, e.g., FIG. 1). Suitable assays are further described in the Examples section below.

[0453] Unless otherwise defined, all technical and scientific terms used herein have the same meaning as commonly understood by one of ordinary skill in the art to which this invention belongs. Although methods and materials similar or equivalent to those described herein can be used in the practice or testing of the antisense polynucleotide agents and methods featured in the invention, suitable methods and materials are described below. All publications, patent applications, patents, and other references mentioned herein are incorporated by reference in their entirety. In addition, the materials, methods, and examples are illustrative only and not intended to be limiting.

### EXAMPLES

### Example 1. Antisense Synthesis

[0454] The antisense polynucleotides targeting AGT were synthesized using standard synthesis methods well known in the art.

[0455] A detailed list of antisense molecules targeting AGT is shown in Table 3.

### Example 2. In Vitro Screening

[0456] I in vitro scrrening of the antisense polynucleotides was performed by transfecting Huh7 cells with a single 5 nM dose of an antisense polynucleotide using methods well known in the art. Table 4 shows the results of single dose transfection screen in cells transfected with the indicated antisense polynucleotide.

[0457] It will be understood that these monomers, when present in an oligonucleotide, are mutually linked by 5′-3′-phosphodiester bonds.

TABLE 2

Abbreviations of nucleotide monomers used in nucleic acid sequence representation

| Abbreviation | Nucleotide(s) |
|---|---|
| A | Adenosine-3′-phosphate |
| Af | 2′-fluoroadenosine-3′-phosphate |
| Afs | 2′-fluoroadenosine-3′-phosphorothioate |
| As | adenosine-3′-phosphorothioate |
| a | 2′-O-methyladenosine-3′-phosphate |
| as | 2′-O-methyladenosine-3′-phosphorothioate |
| C | cytidine-3′-phosphate |
| dA | 2′-deoxyadenosine-3′-phosphate |
| dAs | 2′-deoxyadenosine-3′-phosphorothioate |
| Cf | 2′-fluorocytidine-3′-phosphate |
| Cfs | 2′-fluorocytidine-3′-phosphorothioate |
| Cs | cytidine-3′-phosphorothioate |
| c | 2′-O-methylcytidine-3′-phosphate |
| cs | 2′-O-methylcytidine-3′-phosphorothioate |
| dC | 2′-deoxycytidine-3′-phosphate |
| dCs | 2′-deoxycytidine-3′-phosphorothioate |
| G | guanosine-3′-phosphate |
| Gf | 2′-fluoroguanosine-3′-phosphate |
| Gfs | 2′-fluoroguanosine-3′-phosphorothioate |
| Gs | guanosine-3′-phosphorothioate |
| g | 2′-O-methylguanosine-3′-phosphate |
| gs | 2′-O-methylguanosine-3′-phosphorothioate |
| dG | 2′-deoxyguanosine-3′-phosphate |
| dGs | 2′-deoxyguanosine-3′-phosphorothioate |
| T | 5′-methyluridine-3′-phosphate |
| Tf | 2′-fluoro-5-methyluridine-3′-phosphate |
| Tfs | 2′-fluoro-5-methyluridine-3′-phosphorothioate |
| Ts | 5-methyluridine-3′-phosphorothioate |
| t | 2′-O-methyl-5-methyluridine-3′-phosphate |
| ts | 2′-O-methyl-5-methyluridine-3′-phosphorothioate |
| dT | 2′-deoxythymidine-3′-phosphate |
| dTs | 2′-deoxythymidine-3′-phosphorothioate |
| U | Uridine-3′-phosphate |
| Uf | 2′-fluorouridine-3′-phosphate |
| Ufs | 2′-fluorouridine -3′-phosphorothioate |
| Us | uridine -3′-phosphorothioate |
| u | 2′-O-methyluridine-3′-phosphate |
| us | 2′-O-methyluridine-3′-phosphorothioate |
| dU | 2′-deoxyuridine-3′-phosphate |
| dUs | 2′-deoxyuridine-3′-phosphorothioate |
| s | phosphorothioate linkage |
| N | any nucleotide (G, A, C, T or U) |
| L96 | N-[tris(GalNAc-alkyl)-amidodecanoyl)]-4-hydroxyprolinol Hyp-(GalNAc-alkyl)3 |
| (dt) | deoxy-thymine |
| (5MdC) | 5′-methyl-deoxycytidine-3′-phosphate |
| (5MdC)s | 5′-methyl-deoxycytidine-3′-phosphorothioate |

[0458] The start and end positions which the antisense polynucleotide agents target NM_000029.3 (SEQ ID NO:1) are provided.

TABLE 3

Antisense polynucleotides targeting AGT

| Antisense Polynucleotide Name | Modified sequence | Start | End | SEQ ID NO. |
|---|---|---|---|---|
| A-134944.1 | ascsususcsdTsdGsdAs(5MdC)s(5MdC)s(5MdC)sdTsdGs(5MdC)sdTsgscscscsg | 11 | 30 | 9 |
| A-134945.1 | asascsascsdGsdGsdGsdGsdGs(5MdC)s(5MdC)sdAs(5MdC)sdTsuscsusgsa | 23 | 42 | 10 |
| A-134946.1 | uscsususgs(5MdC)sdTsdTsdAsdGsdGs(5MdC)sdAsdAs(5MdC)sascsgsgsg | 35 | 54 | 11 |
| A-134947.1 | asgsgsgsgsdAsdGsdAsdGsdTs(5MdC)sdTsdTsdGs(5MdC)sususasgsg | 44 | 63 | 12 |
| A-134948.1 | asgsgsgscsdAsdGsdAsdGsdGsdGs(5MdC)sdAsdGsdGsgsgsasgsa | 56 | 75 | 13 |
| A-134949.1 | cscsgsgsasdGsdGsdTsdGs(SMdC)sdAsdGsdAsdGsdGsgscsasgsa | 68 | 87 | 14 |
| A-134950.1 | ascsasusgs(5MdC)sdAsdGsdGs(5MdC)s(5MdC)sdGsdGsdAsdGsgsusgscsa | 77 | 96 | 15 |
| A-134951.1 | asgsasgsgs(5MdC)s(5MdC)sdAs(5MdC)sdAsdGsdGsdGsdAs(5MdC)sasusgscsa | 90 | 109 | 16 |
| A-134952.1 | usgsusascs(5MdC)s(5MdC)s(5MdC)s(5MdC)sdAsdAsdGsdAsdGsdGscscsascsa | 100 | 119 | 17 |
| A-134953.1 | cscscscsgsdGsdGsdAsdGsdAsdTsdGsdTsdAs(5MdC)scscscscsa | 110 | 129 | 18 |
| A-134954.1 | csususcsusdGsdAs(5MdC)s(5MdC)s(5MdC)sdAsdGs(5MdC)s(5MdC)s(5MdC)scsgsgsgsa | 122 | 141 | 19 |
| A-134955.1 | ascscsascs(5MdC)s(5MdC)sdAsdGsdGs(5MdC)s(5MdC)sdTsdTs(5MdC)susgsascsc | 133 | 152 | 20 |
| A-134956.1 | asgscscsusdGsdAsdGsdGs(5MdC)s(5MdC)sdAsdAs(5MdC)s(5MdC)sascscscsa | 145 | 164 | 21 |
| A-134957.1 | asgsgsusgsdTsdGsdTsdGsdAs(5MdC)sdAsdGs(5MdC)s(5MdC)susgsasgsg | 156 | 175 | 22 |
| A-134958.1 | asgscsasus(5MdC)sdTs(5MdC)s(5MdC)s(5MdC)sdTsdAsdGsdGsdTsgsusgsusg | 167 | 186 | 23 |
| A-134959.1 | asgsasasas(5MdC)sdGsdGsdGsdAsdGs(5MdC)sdAsdTs(5MdC)suscscscsu | 176 | 195 | 24 |
| A-134960.1 | gscscsasasdGsdGsdTsdTs(5MdC)s(5MdC)s(5MdC)sdAsdGsdAsasascsgsg | 188 | 207 | 25 |
| A-134961.1 | csasgsgsasdGsdTs(5MdC)sdGsdGsdGsdGs(5MdC)s(5MdC)sdAsasgsgsusu | 199 | 218 | 26 |
| A-134962.1 | ascscsgsasdAsdGsdTsdTsdTsdGs(5MdC)sdAsdGsdGsasgsuscsg | 210 | 229 | 27 |
| A-134963.1 | gsususascsdAs(5MdC)sdAsdTsdTsdTsdAs(5MdC)s(5MdC)sdGsasasgsusu | 221 | 240 | 28 |
| A-134964.1 | gsusgscsasdGsdGsdGsdTs(5MdC)sdGsdAsdGsdTsdTsasesasesa | 233 | 252 | 29 |
| A-134965.1 | asgsasgsusdGsdAsdGs(5MdC)s(5MdC)sdGsdGsdTsdGs(5MdC)sasgsgsgsu | 244 | 263 | 30 |
| A-134966.1 | csascsusgs(5MdC)sdTsdGsdAsdAs(5MdC)sdAsdGsdAsdGsusgsasgsc | 255 | 274 | 31 |
| A-134967.1 | usgscsasgsdAsdGsdTsdTsdTs(5MdC)sdAs(5MdC)sdTsdGscsusgsasa | 265 | 284 | 32 |
| A-134968.1 | usasgsusgsdAsdTs(5MdC)sdGsdAsdTsdGs(5MdC)sdAsdGsasgsususu | 275 | 294 | 33 |
| A-134969.1 | cscsasgsgsdAsdAsdGsdTs(5MdC)sdTsdTsdAsdGsdTsgsasuscsg | 286 | 305 | 34 |
| A-134970.1 | gscsusgsgsdGsdAs(5MdC)s(5MdC)sdTs(5MdC)sdTsdTs(5MdC)s(5MdC)sasgsgsasa | 299 | 318 | 35 |
| A-134971.1 | gsascsascsdTs(5MdC)sdAs(5MdC)sdGs(5MdC)sdTsdGsdGsdGsascscsusc | 308 | 327 | 36 |
| A-134972.1 | gsasusgscs(5MdC)sdAsdGsdAsdAsdGs(5MdC)sdGsdAs(5MdC)sasesuscsa | 320 | 339 | 37 |
| A-134973.1 | csasgsasasdGsdGsdAs(5MdC)sdAsdGsdAsdTsdGs(5MdC)scsasgsasa | 330 | 349 | 38 |
| A-134974.1 | ascscsascsdAsdGsdGs(5MdC)sdTsdGsdGs(5MdC)s(5MdC)sdAsgsasasgsg | 343 | 362 | 39 |
| A-134975.1 | ascsususgsdGs(5MdC)s(5MdC)sdAsdGsdAs(5MdC)s(5MdC)sdAs(5MdC)sasgsgscsu | 353 | 372 | 40 |
| A-134976.1 | gsasgsgsgsdTsdTsdAs(5MdC)sdAsdTs(5MdC)sdAs(5MdC)sdTsusgsgscsc | 365 | 384 | 41 |
| A-134977.1 | gsgscsusgsdGsdAsdGsdAsdGsdGsdAsdGsdGsdGsususascsa | 375 | 394 | 42 |
| A-134978.1 | gscscsusgsdTsdGs(5MdC)sdAs(5MdC)sdAsdGsdGs(5MdC)sdTsgsgsasgsa | 386 | 405 | 43 |
| A-134979.1 | gsususcscs(5MdC)sdAsdGsdGs(5MdC)sdTsdGs(5MdC)s(5MdC)sdTsgsusgscsa | 397 | 416 | 44 |
| A-134980.1 | gsgsgsasusdGsdGsdAsdGs(5MdC)sdTsdGsdTsdTs(5MdC)scscsasgsg | 408 | 427 | 45 |
| A-134981.1 | asgscsusgsdAsdGsdGsdGsdGsdTsdGsdGsdGsdGsasusgsgsa | 420 | 439 | 46 |
| A-134982.1 | gscscscsusdAsdTsdTsdTsdAsdTsdAsdGs(5MdC)sdTsgsasgsgsg | 431 | 450 | 47 |
| A-134983.1 | gsgsgsuscsdAs(5MdC)sdGsdAsdTsdGs(5MdC)s(5MdC)s(5MdC)sdTsasusususa | 441 | 460 | 48 |
| A-134984.1 | uscscscscs(5MdC)sdGsdGs(5MdC)s(5MdC)sdGsdGsdGsdTs(5MdC)sascsgsasu | 451 | 470 | 49 |
| A-134985.1 | ascsgsgscsdAsdGs(5MdC)sdTsdTs(5MdC)sdTsdTs(5MdC)s(5MdC)scscscsgsg | 463 | 482 | 50 |
| A-134986.1 | usascscscsdAsdGsdAsdAs(SMdC)sdAsdAs(SMdC)sdGsdGscsasgscsu | 474 | 493 | 51 |
| A-134987.1 | ususcsusgs(5MdC)sdTsdGsdTsdAsdGsdTsdAs(5MdC)s(5MdC)scsasgsasa | 485 | 504 | 52 |
| A-134988.1 | cscsgscsasdTsdAs(5MdC)s(5MdC)s(5MdC)sdTsdTs(5MdC)sdTsdGscsusgsusa | 495 | 514 | 53 |
| A-134989.1 | gsgsgsgsusdGs(5MdC)sdTs(5MdC)sdGs(5MdC)sdTsdTs(5MdC)s(5MdC)sgscsasusa | 508 | 527 | 54 |
| A-134990.1 | asuscsuscsdAsdGsdAs(5MdC)sdTsdGsdGsdGsdGsdTsgscsuscsg | 518 | 537 | 55 |
| A-134991.1 | cscsgsgscsdAsdGsdGsdAsdGs(5MdC)s(5MdC)sdAsdTs(5MdC)suscsasgsa | 530 | 549 | 56 |
| A-134992.1 | csasgsgscsdTs(5MdC)sdAs(5MdC)sdAs(5MdC)s(5MdC)sdGsdGs(5MdC)sasgsgsasg | 540 | 559 | 57 |
| A-134993.1 | usgsgsusgsdGs(5MdC)s(5MdC)s(5MdC)sdTs(5MdC)sdAsdGsdGs(5MdC)suscsascsa | 550 | 569 | 58 |
| A-134994.1 | gsasgsgscsdAsdGsdAsdGsdGsdAsdTsdGsdGsdTsgsgscscsc | 561 | 580 | 59 |
| A-134995.1 | csasgscscs(5MdC)sdAsdGsdGs(5MdC)s(5MdC)sdAsdGsdGsdAsgsgscsasg | 574 | 593 | 60 |
| A-134996.1 | usgscsasgs(5MdC)s(5MdC)sdAsdGsdGs(5MdC)s(5MdC)sdAsdGs(5MdC)scscsasgsg | 585 | 604 | 61 |
| A-134997.1 | cscscsgsgsdTs(5MdC)sdAs(5MdC)s(5MdC)sdTsdGs(5MdC)sdAsdGscscsasgsg | 595 | 614 | 62 |
| A-134998.1 | gsgsusgsusdAsdTsdGsdTsdAs(5MdC)sdAs(5MdC)s(5MdC)s(5MdC)sgsgsuscsa | 607 | 626 | 63 |
| A-134999.1 | asgsgsusgsdGsdAsdAsdGsdGsdGsdGsdTsdGsdTsasusgsusa | 617 | 636 | 64 |
| A-135000.1 | ususgsusgsdGsdAsdTsdGsdAs(5MdC)sdGsdAsdGsdGsusgsgsasa | 629 | 648 | 65 |
| A-135001.1 | gsgsusascsdTs(5MdC)sdTs(5MdC)sdAsdTsdTsdGsdTsdGsgsasusgsa | 639 | 658 | 66 |
| A-135002.1 | csasgscsusdGs(5MdC)sdTs(5MdC)sdAs(5MdC)sdAsdGsdGsdTsascsuscsu | 651 | 670 | 67 |
| A-135003.1 | usgsgscscsdTsdTsdTsdGs(5MdC)s(5MdC)sdAsdGs(5MdC)sdTsgscsuscsa | 661 | 680 | 68 |
| A-135004.1 | gscsususcs(5MdC)s(5MdC)sdGsdGs(5MdC)sdAsdTsdTsdGsdGscscsususu | 673 | 692 | 69 |
| A-135005.1 | gsgsgsgsus(5MdC)sdTsdTsdTsdGsdGsdGs(5MdC)sdTsdTscscscsgsg | 684 | 703 | 70 |
| A-135006.1 | gsgsusasusdGsdAsdAsdGsdGsdTsdGsdGsdGsdGsuscsususu | 695 | 714 | 71 |
| A-135007.1 | asasususgsdGsdAsdGs(5MdC)sdAsdGsdGsdTsdAsdTsgsasasgsg | 705 | 724 | 72 |
| A-135008.1 | usgsuscsusdTsdGsdGs(5MdC)s(5MdC)sdTsdGsdAsdAsdTsusgsgsasg | 717 | 736 | 73 |
| A-135009.1 | csascsasgsdGsdGsdGsdAsdTsdGsdTs(5MdC)sdTsdTsgsgscscsu | 726 | 745 | 74 |
| A-135010.1 | gscscsususdTsdTs(5MdC)sdAsdTs(5MdC)s(5MdC)sdAs(5MdC)sdAsgsgsgsgsa | 737 | 756 | 75 |
| A-135011.1 | csusgsgsus(5MdC)s(5MdC)sdTsdGsdTsdAsdGsdGsdGs(5MdC)scsusususu | 750 | 769 | 76 |
| A-135012.1 | usasgscsas(5MdC)s(5MdC)sdAsdGs(5MdC)sdTsdGsdGsdTs(5MdC)scsusgsusa | 759 | 778 | 77 |
| A-135013.1 | usususgscsdAsdGs(5MdC)sdGsdAs(5MdC)sdTsdAsdGs(5MdC)sascscsasg | 770 | 789 | 78 |
| A-135014.1 | uscsgsgsusdGsdTs(5MdC)sdAsdAsdGsdTsdTsdTsdTsgscsasgsc | 782 | 801 | 79 |
| A-135015.1 | csasascsusdTsdGsdTs(5MdC)sdTsdTs(5MdC)sdGsdGsdTsgsuscsasa | 792 | 811 | 80 |
| A-135016.1 | csasususgs(5MdC)sdGsdGs(5MdC)s(5MdC)s(5MdC)sdTs(5MdC)sdAsdAscsususgsu | 804 | 823 | 81 |
| A-135017.1 | asgscsasus(5MdC)s(5MdC)s(5MdC)sdGsdAs(5MdC)s(5MdC)sdAsdTsdTsgscsgsgsc | 815 | 834 | 82 |
| A-135018.1 | asgsasasgsdTsdTsdGsdGs(5MdC)s(5MdC)sdAsdGs(5MdC)sdAsuscscscsg | 826 | 845 | 83 |
| A-135019.1 | usascsgsgsdAsdAsdGs(5MdC)s(5MdC)s(5MdC)sdAsdAsdGsdAsasgsususg | 838 | 857 | 84 |
| A-135020.1 | asusgscscsdAsdTsdAsdTsdAsdTsdAs(5MdC)sdGsdGsasasgscsc | 848 | 867 | 85 |
| A-135021.1 | asgscsuscsdAs(5MdC)sdTsdGsdTsdGs(5MdC)sdAsdTsdGscscsasusa | 860 | 879 | 86 |
| A-135022.1 | csascsgscs(5MdC)s(5MdC)s(5MdC)sdAsdTsdAsdGs(5MdC)sdTs(5MdC)sascsusgsu | 870 | 889 | 87 |
| A-135023.1 | gscscscscsdAsdTsdGsdGsdAs(5MdC)s(5MdC)sdAs(5MdC)sdGscscscscsa | 881 | 900 | 88 |
| A-135024.1 | gsasgsgsas(5MdC)sdGsdGsdTsdGsdGs(5MdC)s(5MdC)s(5MdC)s(5MdC)sasusgsgsa | 891 | 910 | 89 |
| A-135025.1 | csasgscscsdGsdTsdTsdGsdGsdGsdGsdAsdGsdAsgsgsascsg | 904 | 923 | 90 |
| A-135026.1 | gsusgscscsdAsdAsdAsdGsdAs(5MdC)sdAsdGs(5MdC)s(5MdC)sgsususgsg | 914 | 933 | 91 |
| A-135027.1 | asgsasgsasdGsdGs(5MdC)s(5MdC)sdAsdGsdGsdGsdTsdGscscsasasa | 926 | 945 | 92 |
| A-135028.1 | cscscsasgsdAsdTsdAsdGsdAsdGsdAsdGsdAsdGsgscscsasg | 935 | 954 | 93 |
| A-135029.1 | usgsgsuscs(5MdC)sdAsdAsdGsdGs(5MdC)sdTs(5MdC)s(5MdC)s(5MdC)sasgsasusa | 947 | 966 | 94 |
| A-135030.1 | csusgsuscsdAsdGs(5MdC)sdTsdGsdTsdGsdTsdGsdGsuscscsasa | 959 | 978 | 95 |
| A-135031.1 | gscscsusgsdTsdAsdGs(5MdC)s(5MdC)sdTsdGsdTs(5MdC)sdAsgscsusgsu | 968 | 987 | 96 |
| A-135032.1 | asascsascs(5MdC)s(5MdC)sdAsdGsdGsdAsdTsdTsdGs(5MdC)scsusgsusa | 981 | 1000 | 97 |
| A-135033.1 | csususcscsdAsdAsdGsdGsdAsdAs(5MdC)sdAs(5MdC)s(5MdC)scsasgsgsa | 990 | 1009 | 98 |
| A-135034.1 | usgscsasgsdTsdTs(5MdC)sdTsdTsdGsdTs(5MdC)s(5MdC)sdTsuscscsasa | 1003 | 1022 | 99 |
| A-135035.1 | csasgscscsdGsdGsdGsdAsdGsdGsdTsdGs(5MdC)sdAsgsususcsu | 1014 | 1033 | 100 |
| A-135036.1 | ususgsusgs(5MdC)sdGs(5MdC)sdAsdTs(5MdC)s(5MdC)sdAsdGs(5MdC)scsgsgsgsa | 1025 | 1044 | 101 |
| A-135037.1 | csasgsascsdAsdGsdGsdAs(5MdC)s(5MdC)sdTsdTsdGsdTsgscsgscsa | 1036 | 1055 | 102 |
| A-135038.1 | asgscscsusdGs(5MdC)sdAsdGsdGsdGs(5MdC)sdAsdGsdAscsasgsgsa | 1047 | 1066 | 103 |
| A-135039.1 | asgsgscscs(5MdC)sdTsdGsdTsdAs(5MdC)sdAsdGs(5MdC)s(5MdC)susgscsasg | 1058 | 1077 | 104 |
| A-135040.1 | gsgscscsas(5MdC)sdTsdAsdGs(5MdC)sdAsdGsdGs(5MdC)s(5MdC)scsusgsusa | 1068 | 1087 | 105 |
| A-135041.1 | asgscscscsdTsdGs(5MdC)s(5MdC)s(5MdC)sdTsdGsdGsdGs(5MdC)scsascsusa | 1080 | 1099 | 106 |
| A-135042.1 | csusgsgscsdTsdAsdTs(5MdC)sdAsdGs(5MdC)s(5MdC)s(5MdC)sdTsgscscscsu | 1089 | 1108 | 107 |
| A-135043.1 | gscsasgscsdAsdGs(5MdC)sdTsdGsdGsdGs(5MdC)s(5MdC)sdTsgsgscsusa | 1102 | 1121 | 108 |
| A-135044.1 | csascscsgsdTsdGsdGsdAs(5MdC)sdAsdGs(5MdC)sdAsdGscsasgscsu | 1113 | 1132 | 109 |
| A-135045.1 | asascsascsdGs(5MdC)s(5MdC)s(5MdC)sdAs(5MdC)s(5MdC)sdAs(5MdC)s(5MdC)sgsusgsgsa | 1124 | 1143 | 110 |
| A-135046.1 | usgsgsgsgs(5MdC)sdTsdGsdTsdGsdAsdAs(5MdC)sdAs(5MdC)sgscscscsa | 1134 | 1153 | 111 |
| A-135047.1 | gsgsusgscsdAsdGsdGs(5MdC)s(5MdC)sdTsdGsdGsdGsdGscsusgsusg | 1144 | 1163 | 112 |
| A-135048.1 | asascsgsgs(5MdC)sdTsdGs(5MdC)sdTsdTs(5MdC)sdAsdGsdGsusgscsasg | 1157 | 1176 | 113 |
| A-135049.1 | gscscscsusdGs(5MdC)sdAs(5MdC)sdAsdAsdAs(5MdC)sdGsdGscsusgscsu | 1167 | 1186 | 114 |
| A-135050.1 | asusasgsasdGsdAsdGs(5MdC)s(5MdC)sdAsdGsdGs(5MdC)s(5MdC)scsusgscsa | 1179 | 1198 | 115 |
| A-135051.1 | csascsasgsdGsdGsdGsdTsdAsdTsdAsdGsdAsdGsasgscscsa | 1188 | 1207 | 116 |
| A-135052.1 | csgsusgsgsdGsdAsdGsdGsdAs(5MdC)s(5MdC)sdAs(5MdC)sdAsgsgsgsgsu | 1199 | 1218 | 117 |
| A-135053.1 | gsasasgsus(5MdC)s(5MdC)sdAsdGsdAsdGsdAsdGs(5MdC)sdGsusgsgsgsa | 1212 | 1231 | 118 |
| A-135054.1 | uscscsasgsdTsdTs(5MdC)sdTsdGsdTsdGsdAsdAsdGsuscscsasg | 1223 | 1242 | 119 |
| A-135055.1 | csasgscsasdGs(5MdC)sdAsdAs(5MdC)sdAsdTs(5MdC)s(5MdC)sdAsgsususcsu | 1234 | 1253 | 120 |
| A-135056.1 | gsuscsasasdTs(5MdC)sdTsdTs(5MdC)sdTs(5MdC)sdAsdGs(5MdC)sasgscsasa | 1245 | 1264 | 121 |
| A-135057.1 | csasusgsasdAs(5MdC)s(5MdC)sdTsdGsdTs(5MdC)sdAsdAsdTscsususcsu | 1254 | 1273 | 122 |
| A-135058.1 | gsuscsascsdAsdGs(5MdC)s(5MdC)sdTsdGs(5MdC)sdAsdTsdGsasascscsu | 1265 | 1284 | 123 |
| A-135059.1 | gsuscsusus(5MdC)s(5MdC)sdAsdTs(5MdC)s(5MdC)sdTsdGsdTs(5MdC)sascsasgsc | 1277 | 1296 | 124 |
| A-135060.1 | asgsgsgsasdGs(5MdC)sdAsdGs(5MdC)s(5MdC)sdAsdGsdTs(5MdC)sususcscsa | 1289 | 1308 | 125 |
| A-135061.1 | usgsgscsus(5MdC)s(5MdC)s(5MdC)sdAsdTs(5MdC)sdAsdGsdGsdGsasgscsasg | 1300 | 1319 | 126 |
| A-135062.1 | csusgsuscs(5MdC)sdAs(5MdC)sdAs(5MdC)sdTsdGsdGs(5MdC)sdTscscscsasu | 1310 | 1329 | 127 |
| A-135063.1 | asasgscscsdAsdGsdGsdGsdTsdGs(5MdC)sdTsdGsdTscscsascsa | 1321 | 1340 | 128 |
| A-135064.1 | csgsusasgsdGsdTsdGsdTsdTsdGsdAsdAsdAsdGscscsasgsg | 1333 | 1352 | 129 |
| A-135065.1 | gsgsasasgsdTsdGsdGsdAs(5MdC)sdGsdTsdAsdGsdGsusgsususg | 1342 | 1361 | 130 |
| A-135066.1 | ususcsasus(5MdC)sdTsdTs(5MdC)s(5MdC)s(5MdC)sdTsdTsdGsdGsasasgsusg | 1355 | 1374 | 131 |
| A-135067.1 | gsasgsasasdGs(5MdC)s(5MdC)s(5MdC)sdTsdTs(5MdC)sdAsdTs(5MdC)sususcscsc | 1364 | 1383 | 132 |
| A-135068.1 | csuscsgsgs(5MdC)s(5MdC)sdAsdGs(5MdC)sdAsdGsdGsdGsdAsgsasasgsc | 1377 | 1396 | 133 |
| A-135069.1 | csuscscsusdGsdGsdGsdGs(5MdC)sdTs(5MdC)sdGsdGs(5MdC)scsasgscsa | 1386 | 1405 | 134 |
| A-135070.1 | usgsuscscsdAs(5MdC)s(5MdC)s(5MdC)sdAsdGsdAsdAs(5MdC)sdTscscsusgsg | 1399 | 1418 | 135 |
| A-135071.1 | gsasgsgsusdGs(5MdC)sdTsdGsdTsdTsdGsdTs(5MdC)s(5MdC)sascscscsa | 1409 | 1428 | 136 |
| A-135072.1 | asascsasgsdAs(5MdC)sdAs(5MdC)sdTsdGsdAsdGsdGsdTsgscsusgsu | 1419 | 1438 | 137 |
| A-135073.1 | asgsasgsasdGs(5MdC)sdAsdTsdGsdGsdGsdAsdAs(5MdC)sasgsasesa | 1431 | 1450 | 138 |
| A-135074.1 | usgscscscsdAsdTsdGs(5MdC)s(5MdC)sdAsdGsdAsdGsdAsgscsasusg | 1441 | 1460 | 139 |
| A-135075.1 | csasgsusgs(5MdC)sdTsdGsdGsdAsdAsdGsdGsdTsdGscscscsasu | 1454 | 1473 | 140 |
| A-135076.1 | asusgsuscsdAs(5MdC)sdTs(5MdC)s(5MdC)sdAsdGsdTsdGs(5MdC)susgsgsasa | 1463 | 1482 | 141 |
| A-135077.1 | asasgsususdGsdTs(5MdC)s(5MdC)sdTsdGsdGsdAsdTsdGsuscsascsu | 1475 | 1494 | 142 |
| A-135078.1 | asgsuscsas(5MdC)s(5MdC)sdGsdAsdGsdAsdAsdGsdTsdTsgsuscscsu | 1485 | 1504 | 143 |
| A-135079.1 | asasgsgsgs(SMdC)sdAs(SMdC)sdTsdTsdGsdAsdGsdTs(SMdC)sascscsgsa | 1496 | 1515 | 144 |
| A-135080.1 | gsgscsgscsdTs(5MdC)sdTs(5MdC)sdAsdGsdTsdGsdAsdAsgsgsgscsa | 1509 | 1528 | 145 |
| A-135081.1 | gscsasgscsdAsdGsdGs(5MdC)sdAsdGsdGs(5MdC)sdGs(5MdC)suscsuscsa | 1519 | 1538 | 146 |
| A-135082.1 | gsasgsgscsdTsdGsdGsdAsdTs(5MdC)sdAsdGs(5MdC)sdAsgscsasgsg | 1531 | 1550 | 147 |
| A-135083.1 | gsasgsgscsdAsdTsdAsdGsdTsdGsdAsdGsdGs(5MdC)susgsgsasu | 1541 | 1560 | 148 |
| A-135084.1 | ususgsuscs(5MdC)sdAsdGsdGsdTs(5MdC)sdAsdGsdAsdGsgscsasusa | 1553 | 1572 | 149 |
| A-135085.1 | ascscscsus(5MdC)s(5MdC)sdAs(5MdC)s(5MdC)sdTsdTsdGsdTs(5MdC)scsasgsgsu | 1563 | 1582 | 150 |
| A-135086.1 | csusgsgsasdAsdAsdGsdTsdGsdAsdGsdAs(5MdC)s(5MdC)scsuscscsa | 1575 | 1594 | 151 |
| A-135087.1 | gsgsgsasgsdTsdTsdTsdTsdGs(5MdC)sdTsdGsdGsdAsasasgsusg | 1585 | 1604 | 152 |
| A-135088.1 | csasuscscsdAsdGsdTsdTsdGsdAsdGsdGsdGsdAsgsusususu | 1596 | 1615 | 153 |
| A-135089.1 | gsasusasgsdTsdTsdTs(5MdC)sdTsdTs(5MdC)sdAsdTs(5MdC)scsasgsusu | 1607 | 1626 | 154 |
| A-135090.1 | asusgsgsus(5MdC)s(5MdC)sdGsdGsdGsdGsdAsdGsdAsdTsasgsususu | 1619 | 1638 | 155 |
| A-135091.1 | usgsgsuscsdAsdGsdGsdTsdGsdGsdAsdTsdGsdGsuscscsgsg | 1630 | 1649 | 156 |
| A-135092.1 | csasgsususdGsdGsdGsdGs(5MdC)sdAsdTsdGsdGsdTscsasgsgsu | 1641 | 1660 | 157 |
| A-135093.1 | ususgscsasdGs(5MdC)sdAs(5MdC)s(5MdC)sdAsdGsdTsdTsdGsgsgsgscsa | 1650 | 1669 | 158 |
| A-135094.1 | gsuscsasusdAsdAsdGsdAsdTs(5MdC)s(5MdC)sdTsdTsdGscsasgscsa | 1662 | 1681 | 159 |
| A-135095.1 | asgsgsuscs(5MdC)sdTsdGs(5MdC)sdAsdGsdGsdTs(5MdC)sdAsusasasgsa | 1673 | 1692 | 160 |
| A-135096.1 | csusgsgsgs(5MdC)sdGsdAsdGs(5MdC)sdAsdGsdGsdTs(5MdC)scsusgscsa | 1683 | 1702 | 161 |
| A-135097.1 | gsgsgscsasdGs(5MdC)sdTs(5MdC)sdAsdGs(5MdC)s(5MdC)sdTsdGsgsgscsgsa | 1695 | 1714 | 162 |
| A-135098.1 | gscsasgsasdAsdTsdGsdGs(5MdC)sdGsdGsdGs(5MdC)sdAsgscsuscsa | 1705 | 1724 | 163 |
| A-135099.1 | csasgscsus(5MdC)sdGsdGsdTsdGsdTsdGs(5MdC)sdAsdGsasasusgsg | 1716 | 1735 | 164 |
| A-135100.1 | ususususgs(5MdC)sdAsdGsdGsdTsdTs(5MdC)sdAsdGs(5MdC)suscsgsgsu | 1727 | 1746 | 165 |
| A-135101.1 | gsuscsasusdTsdGs(5MdC)sdTs(5MdC)sdAsdAsdTsdTsdTsususgscsa | 1740 | 1759 | 166 |
| A-135102.1 | ascscscsusdGsdAsdTsdGs(5MdC)sdGsdGsdTs(5MdC)sdAsususgscsu | 1751 | 1770 | 167 |
| A-135103.1 | gscsascscsdTs(5MdC)s(5MdC)s(5MdC)s(5MdC)s(5MdC)sdAs(5MdC)s(5MdC)s(5MdC)susgsasusg | 1762 | 1781 | 168 |
| A-135104.1 | asusgscsusdGsdTsdTs(5MdC)sdAsdGs(5MdC)sdAs(5MdC)s(5MdC)suscscscsc | 1772 | 1791 | 169 |
| A-135105.1 | asgscsuscsdAsdAsdAsdAsdAsdAsdAsdAsdTsdGscsusgsusu | 1784 | 1803 | 170 |
| A-135106.1 | asuscscsgs(5MdC)sdTsdTs(5MdC)sdAsdAsdGs(5MdC)sdTs(5MdC)sasasasasa | 1794 | 1813 | 171 |
| A-135107.1 | gsgsgscsus(5MdC)sdTs(5MdC)sdTs(5MdC)sdTs(5MdC)sdAsdTs(5MdC)scsgscsusu | 1806 | 1825 | 172 |
| A-135108.1 | asgsascsus(5MdC)sdTsdGsdTsdGsdGsdGs(5MdC)sdTs(5MdC)suscsuscsu | 1815 | 1834 | 173 |
| A-135109.1 | usasasgscsdTsdGsdTsdTsdGsdGsdGsdTsdAsdGsascsuscsu | 1828 | 1847 | 174 |
| A-135110.1 | uscsasgsgs(5MdC)sdTsdTsdGsdTsdTsdAsdAsdGs(5MdC)susgsususg | 1838 | 1857 | 175 |
| A-135111.1 | cscsuscscsdAsdAsdGsdAs(5MdC)s(5MdC)sdTs(5MdC)sdAsdGsgscsususg | 1849 | 1868 | 176 |
| A-135112.1 | gsgsususcsdAsdGsdGsdGsdTs(5MdC)sdAs(5MdC)s(5MdC)sdTscscsasasg | 1861 | 1880 | 177 |
| A-135113.1 | asgsgsasasdTsdGsdGsdGs(5MdC)sdGsdGsdTsdTs(5MdC)sasgsgsgsu | 1871 | 1890 | 178 |
| A-135114.1 | csascsasgs(5MdC)sdAsdAsdAs(5MdC)sdAsdGsdGsdAsdAsusgsgsgsc | 1881 | 1900 | 179 |
| A-135115.1 | gscsusususdGsdAsdTs(5MdC)sdAsdTsdAs(5MdC)sdAs(5MdC)sasgscsasa | 1893 | 1912 | 180 |
| A-135116.1 | gsgsgscsasdGsdTsdGsdGs(5MdC)sdGs(5MdC)sdTsdTsdTsgsasuscsa | 1903 | 1922 | 181 |
| A-135117.1 | cscsasgsgsdAsdAsdGsdTsdGs(5MdC)sdAsdGsdGsdGscsasgsusg | 1915 | 1934 | 182 |
| A-135118.1 | gscscsascsdGs(5MdC)sdGsdGs(5MdC)s(5MdC)s(5MdC)sdAsdGsdGsasasgsusg | 1925 | 1944 | 183 |
| A-135119.1 | csuscsasgs(5MdC)sdGsdGsdGsdTsdTsdGsdGs(5MdC)s(5MdC)sascsgscsg | 1937 | 1956 | 184 |
| A-135120.1 | uscsasusgs(5MdC)sdTsdGsdTsdGs(5MdC)sdTs(5MdC)sdAsdGscsgsgsgsu | 1947 | 1966 | 185 |
| A-135121.1 | gsgsgscscs(5MdC)sdTsdGsdGs(5MdC)s(5MdC)sdTs(5MdC)sdAsdTsgscsusgsu | 1958 | 1977 | 186 |
| A-135122.1 | csascsusgsdTsdGsdTsdTs(5MdC)sdTsdGsdGsdGsdGscscscsusg | 1970 | 1989 | 187 |
| A-135123.1 | gscscsususdGs(5MdC)s(5MdC)sdAsdGsdGs(5MdC)sdAs(5MdC)sdTsgsusgsusu | 1981 | 2000 | 188 |
| A-135124.1 | csasgsgsgsdGs(5MdC)sdAsdGsdAsdGsdGs(5MdC)s(5MdC)sdTsusgscscsa | 1992 | 2011 | 189 |
| A-135125.1 | cscsuscsasdAsdAsdGsdGs(5MdC)s(5MdC)sdAsdGsdGsdGsgscsasgsa | 2002 | 2021 | 190 |
| A-135126.1 | csusgscsusdGsdGs(5MdC)s(5MdC)sdTsdTsdTsdGs(5MdC)s(5MdC)suscsasasa | 2015 | 2034 | 191 |
| A-135127.1 | ususgsususdAsdTs(5MdC)sdTsdGs(5MdC)sdTsdGs(5MdC)sdTsgsgscscsu | 2025 | 2044 | 192 |
| A-135128.1 | usususgsus(5MdC)s(5MdC)sdGsdGsdGsdGsdTsdTsdGsdTsusasuscsu | 2036 | 2055 | 193 |
| A-135129.1 | csascsasus(5MdC)sdGs(5MdC)sdTsdGsdAsdTsdTsdTsdGsuscscsgsg | 2047 | 2066 | 194 |
| A-135130.1 | ascsusgsgsdGsdGsdGsdTsdGsdAs(5MdC)sdAs(5MdC)sdAsuscsgscsu | 2058 | 2077 | 195 |
| A-135131.1 | asasasgsgsdTsdGsdGsdGsdAsdGsdAs(5MdC)sdTsdGsgsgsgsgsu | 2069 | 2088 | 196 |
| A-135132.1 | csasususasdGsdAsdAsdGsdAsdAsdAsdAsdGsdGsusgsgsgsa | 2079 | 2098 | 197 |
| A-135133.1 | uscsasasasdGsdTs(5MdC)sdGsdAs(5MdC)sdTs(5MdC)sdAsdTsusasgsasa | 2091 | 2110 | 198 |
| A-135134.1 | gscsususus(5MdC)s(5MdC)sdAsdGs(5MdC)sdTs(5MdC)sdAsdAsdAsgsuscsgsa | 2101 | 2120 | 199 |
| A-135135.1 | gsasgsasasdAs(5MdC)sdGsdGs(5MdC)sdTsdGs(5MdC)sdTsdTsuscscsasg | 2112 | 2131 | 200 |
| A-135136.1 | csascsususdAsdGsdAs(5MdC)s(5MdC)sdAsdAsdGsdGsdAsgsasasasc | 2125 | 2144 | 201 |
| A-135137.1 | csasusgscsdAsdGs(5MdC)sdAs(5MdC)sdAs(5MdC)sdTsdTsdAsgsascscsa | 2134 | 2153 | 202 |
| A-135138.1 | usascsusgs(5MdC)sdTs(5MdC)sdAs(5MdC)sdTs(5MdC)s(5MdC)sdAsdTsgscsasgsc | 2146 | 2165 | 203 |
| A-135139.1 | csusgscsasdGsdGs(5MdC)sdTsdTs(5MdC)sdTsdAs(5MdC)sdTsgscsuscsa | 2157 | 2176 | 204 |
| A-135140.1 | csasusususdGsdTsdGs(5MdC)s(5MdC)sdGs(5MdC)sdTsdGs(5MdC)sasgsgscsu | 2168 | 2187 | 205 |
| A-135141.1 | asascsusgsdGsdGsdAsdGsdGsdTsdGs(5MdC)sdAsdTsususgsusg | 2180 | 2199 | 206 |
| A-135142.1 | asascscscsdAsdGs(5MdC)sdAsdAsdAs(5MdC)sdTsdGsdGsgsasgsgsu | 2189 | 2208 | 207 |
| A-135143.1 | uscsuscsusdAsdAsdAsdAsdTsdAsdAsdAs(5MdC)s(5MdC)scsasgscsa | 2200 | 2219 | 208 |
| A-135144.1 | uscscscscsdAs(5MdC)s(5MdC)s(5MdC)s(5MdC)s(5MdC)sdAsdTsdTs(5MdC)suscsusasa | 2213 | 2232 | 209 |
| A-135145.1 | usgsgsusus(5MdC)sdTsdTsdGs(5MdC)s(5MdC)sdTs(5MdC)s(5MdC)s(5MdC)scsascscsc | 2224 | 2243 | 210 |
| A-135146.1 | gscsgscsusdAsdAsdAs(5MdC)sdAs(5MdC)sdTsdGsdGsdTsuscsususg | 2235 | 2254 | 211 |
| A-135147.1 | csasgsusasdGsdTs(5MdC)s(5MdC)s(5MdC)sdGs(5MdC)sdGs(5MdC)sdTsasasascsa | 2245 | 2264 | 212 |
| A-135148.1 | uscsusususdTsdTsdGsdGsdAsdAs(5MdC)sdAsdGsdTsasgsuscsc | 2256 | 2275 | 213 |
| A-135149.1 | csgsgsususdGsdGsdAsdAsdTsdTs(5MdC)sdTsdTsdTsususgsgsa | 2266 | 2285 | 214 |
| A-135150.1 | asascsasasdGs(5MdC)sdTsdGsdGsdTs(5MdC)sdGsdGsdTsusgsgsasa | 2277 | 2296 | 215 |
| A-135151.1 | ususususgsdTsdTsdTs(5MdC)sdAs(5MdC)sdAsdAsdAs(5MdC)sasasgscsu | 2289 | 2308 | 216 |
| A-135152.1 | asasgsgsgsdAsdAs(5MdC)sdAs(5MdC)sdTsdTsdTsdTsdTsusgsususu | 2301 | 2320 | 217 |
| A-135153.1 | csasascsusdTsdGsdAsdAsdAsdAsdGsdGsdGsdAsascsascsu | 2310 | 2329 | 218 |
| A-135154.1 | asususususdTsdGsdTsdTs(5MdC)sdTs(5MdC)sdAsdAs(5MdC)sususgsasa | 2321 | 2340 | 219 |
| A-135155.1 | asususususdAsdAsdAsdAs(5MdC)s(5MdC)s(5MdC)sdAsdAsdTsususususg | 2334 | 2353 | 220 |
| A-135156.1 | usgsusasusdAs(5MdC)sdTsdTsdTsdAsdAsdTsdTsdTsusasasasa | 2345 | 2364 | 221 |
| A-135157.1 | asasusgscsdAsdAsdAsdAsdAsdTsdGsdTsdAsdTsascsususu | 2355 | 2374 | 222 |
| A-135158.1 | asasascscsdGsdAsdAsdGsdGs(SMdC)sdAsdAsdTsdGscsasasasa | 2366 | 2385 | 223 |
| A-135159.1 | gsasesasesdTsdAsdAsdAsdTsdAs(5MdC)sdAsdAsdAscscsgsasa | 2378 | 2397 | 224 |
| A-135160.1 | csususascsdAsdTsdTs(5MdC)sdAsdAsdGsdAs(5MdC)sdAscsusasasa | 2389 | 2408 | 225 |
| A-135161.1 | gsasgsgsus(5MdC)sdAsdTsdGsdTsdTs(5MdC)sdTsdTsdAscsasususc | 2400 | 2419 | 226 |
| A-135162.1 | csascsusas(5MdC)sdAs(5MdC)sdGsdGsdAsdGsdGsdTs(5MdC)sasusgsusu | 2409 | 2428 | 227 |
| A-135163.1 | asasgsgsusdAsdTsdTsdAs(5MdC)sdAsdGsdAs(5MdC)sdAscsusascsa | 2422 | 2441 | 228 |
| A-135164.1 | gsasasasasdAsdAs(5MdC)sdTsdAsdAsdGsdGsdTsdAsususasesa | 2431 | 2450 | 229 |
| A-135165.1 | ascsasasgs(5MdC)sdAsdTs(5MdC)sdTsdGsdTsdGsdGsdAsasasasasa | 2444 | 2463 | 230 |
| A-135166.1 | uscsasasasdAsdAsdTs(5MdC)sdAs(5MdC)sdAsdAsdGs(5MdC)sasuscsusg | 2453 | 2472 | 231 |
| A-135167.1 | usususcsas(5MdC)sdGsdTsdAsdTsdTsdGsdTsdTs(5MdC)sasasasasa | 2466 | 2485 | 232 |
| A-135168.1 | gsusgscsusdTsdGs(5MdC)sdAsdTs(5MdC)sdTsdTsdTs(5MdC)sascsgsusa | 2477 | 2496 | 233 |
| A-135169.1 | csasgsasasdAsdTsdTs(5MdC)sdAsdGsdGsdTsdGs(5MdC)sususgscsa | 2488 | 2507 | 234 |
| A-135170.1 | cscsgscsasdTsdTs(5MdC)sdAsdAsdAs(5MdC)sdAsdGsdAsasasususc | 2499 | 2518 | 235 |
| A-135171.1 | gscsusasusdGsdGsdTsdTs(5MdC)s(5MdC)sdGs(5MdC)sdAsdTsuscsasasa | 2508 | 2527 | 236 |
| A-135172.1 | gsasgsasasdAsdTsdAsdAs(5MdC)s(5MdC)sdAsdGs(5MdC)sdTsasusgsgsu | 2520 | 2539 | 237 |
| A-135173.1 | csusasascsdAs(5MdC)sdAsdAsdGsdGsdGsdAsdGsdAsasasusasa | 2531 | 2550 | 238 |
| A-135174.1 | gsascsgsusdTsdTsdAsdTsdTsdAs(5MdC)sdTsdAsdAscsascsasa | 2542 | 2561 | 239 |
| A-135175.1 | usasususgsdTsdGsdGs(5MdC)sdAsdAsdGsdAs(5MdC)sdGsusususasu | 2553 | 2572 | 240 |
| A-135176.1 | usususgsgsdAsdGsdGs(5MdC)sdTsdTsdAsdTsdTsdGsusgsgscsa | 2563 | 2582 | 241 |

TABLE 4

AGT Single Dose Screen in Huh7 cells

| Antisense polynucleotide agent name | KD | SD |
|---|---|---|
| A-134944.1 | 80.3 | 14.7 |
| A-134945.1 | 95.3 | 8.3 |
| A-134946.1 | 102.4 | 7.3 |
| A-134947.1 | 93.0 | 5.0 |
| A-134948.1 | 102.7 | 7.9 |
| A-134949.1 | 103.4 | 5.8 |
| A-134950.1 | 98.9 | 13.0 |
| A-134951.1 | 108.8 | 9.4 |
| A-134952.1 | 130.4 | 10.3 |
| A-134953.1 | 111.7 | 4.5 |
| A-134954.1 | 88.4 | 2.8 |
| A-134955.1 | 89.2 | 11.2 |
| A-134956.1 | 105.4 | 12.8 |
| A-134957.1 | 90.0 | 16.8 |
| A-134958.1 | 103.8 | 14.9 |
| A-134959.1 | 103.7 | 9.9 |
| A-134960.1 | 89.3 | 16.5 |
| A-134961.1 | 92.9 | 2.4 |
| A-134962.1 | 109.3 | 15.9 |
| A-134963.1 | 137.7 | 14.9 |
| A-134964.1 | 101.0 | 7.7 |
| A-134965.1 | 87.7 | 6.5 |
| A-134966.1 | 97.8 | 11.5 |
| A-134967.1 | 119.9 | 7.5 |
| A-134968.1 | 107.0 | 11.9 |
| A-134969.1 | 97.6 | 4.9 |
| A-134970.1 | 99.9 | 7.8 |
| A-134971.1 | 106.6 | 5.2 |
| A-134972.1 | 120.9 | 4.9 |
| A-134973.1 | 119.8 | 4.4 |
| A-134974.1 | 94.4 | 4.7 |
| A-134975.1 | 94.7 | 10.4 |
| A-134976.1 | 104.2 | 13.2 |
| A-134977.1 | 112.4 | 17.5 |
| A-134978.1 | 104.0 | 12.1 |
| A-134979.1 | 91.3 | 9.4 |
| A-134980.1 | 88.9 | 10.9 |
| A-134981.1 | 94.5 | 4.7 |
| A-134982.1 | 96.0 | 4.3 |
| A-134983.1 | 106.5 | 4.9 |
| A-134984.1 | 64.6 | 5.5 |
| A-134985.1 | 58.9 | 6.5 |
| A-134986.1 | 35.5 | 5.1 |
| A-134987.1 | 56.7 | 15.1 |
| A-134988.1 | 67.4 | 13.6 |
| A-134989.1 | 58.8 | 2.2 |
| A-134990.1 | 60.6 | 27.9 |
| A-134991.1 | 76.4 | 28.6 |
| A-134992.1 | 64.1 | 7.2 |
| A-134993.1 | 53.9 | 4.0 |
| A-134994.1 | 105.1 | 10.8 |
| A-134995.1 | 94.9 | 4.5 |
| A-134996.1 | 109.5 | 5.0 |
| A-134997.1 | 121.2 | 25.9 |
| A-134998.1 | 112.4 | 24.0 |
| A-134999.1 | 97.4 | 36.0 |
| A-135000.1 | 127.5 | 13.6 |
| A-135001.1 | 117.9 | 21.8 |
| A-135002.1 | 100.3 | 3.5 |
| A-135003.1 | 81.0 | 16.3 |
| A-135004.1 | 68.1 | 15.5 |
| A-135005.1 | 76.0 | 25.0 |
| A-135006.1 | 83.7 | 4.4 |
| A-135007.1 | 93.6 | 22.7 |
| A-135008.1 | 80.9 | 3.9 |
| A-135009.1 | 92.4 | 7.4 |
| A-135010.1 | 99.0 | 2.9 |
| A-135011.1 | 81.1 | 11.8 |
| A-135012.1 | 66.8 | 1.9 |
| A-135013.1 | 75.1 | 4.6 |
| A-135014.1 | 77.7 | 4.2 |
| A-135015.1 | 89.5 | 8.3 |
| A-135016.1 | 102.1 | 13.1 |
| A-135017.1 | 99.1 | 11.9 |
| A-135018.1 | 84.5 | 22.5 |
| A-135019.1 | 94.8 | 23.6 |
| A-135020.1 | 63.4 | 10.0 |
| A-135021.1 | 64.8 | 6.9 |
| A-135022.1 | 66.2 | 4.6 |
| A-135023.1 | 97.2 | 8.3 |
| A-135024.1 | 80.6 | 7.6 |
| A-135025.1 | 74.1 | 11.4 |
| A-135026.1 | 87.4 | 5.4 |
| A-135027.1 | 74.0 | 9.0 |
| A-135028.1 | 65.3 | 8.0 |
| A-135029.1 | 81.0 | 11.5 |
| A-135030.1 | 73.5 | 4.4 |
| A-135031.1 | 88.4 | 6.5 |
| A-135032.1 | 46.7 | 3.7 |
| A-135033.1 | 65.3 | 4.4 |
| A-135034.1 | 47.5 | 3.0 |
| A-135035.1 | 84.3 | 15.5 |
| A-135036.1 | 102.2 | 14.3 |
| A-135037.1 | 111.7 | 12.2 |
| A-135038.1 | 116.9 | 8.5 |
| A-135039.1 | 98.9 | 14.6 |
| A-135040.1 | 111.8 | 8.3 |
| A-135041.1 | 77.8 | 10.3 |
| A-135042.1 | 85.2 | 15.2 |
| A-135043.1 | 104.0 | 23.9 |
| A-135044.1 | 62.7 | 10.7 |
| A-135045.1 | 70.7 | 9.1 |
| A-135046.1 | 74.7 | 5.4 |
| A-135047.1 | 90.9 | 17.3 |
| A-135048.1 | 84.1 | 7.3 |
| A-135049.1 | 48.4 | 6.4 |
| A-135050.1 | 90.2 | 5.2 |
| A-135051.1 | 97.0 | 1.5 |
| A-135052.1 | 98.8 | 5.9 |
| A-135053.1 | 113.1 | 3.7 |
| A-135054.1 | 47.9 | 5.1 |
| A-135055.1 | 37.2 | 4.8 |
| A-135056.1 | 34.0 | 3.8 |
| A-135057.1 | 44.7 | 5.8 |
| A-135058.1 | 61.6 | 1.9 |
| A-135059.1 | 30.2 | 4.2 |
| A-135060.1 | 70.0 | 9.1 |
| A-135061.1 | 80.4 | 6.5 |
| A-135062.1 | 81.5 | 11.1 |
| A-135063.1 | 63.4 | 4.0 |
| A-135064.1 | 84.5 | 12.6 |
| A-135065.1 | 85.6 | 7.4 |
| A-135066.1 | 91.2 | 4.9 |
| A-135067.1 | 63.4 | 3.9 |
| A-135068.1 | 92.3 | 5.7 |
| A-135069.1 | 66.4 | 3.3 |
| A-135070.1 | 52.6 | 5.2 |
| A-135071.1 | 87.5 | 15.6 |
| A-135072.1 | 68.2 | 5.1 |
| A-135073.1 | 105.9 | 9.3 |
| A-135074.1 | 74.1 | 11.8 |
| A-135075.1 | 81.3 | 9.7 |
| A-135076.1 | 91.1 | 13.2 |
| A-135077.1 | 85.4 | 7.9 |
| A-135078.1 | 80.3 | 6.3 |
| A-135079.1 | 89.7 | 7.4 |
| A-135080.1 | 91.0 | 4.6 |
| A-135081.1 | 79.0 | 6.8 |
| A-135082.1 | 90.4 | 6.3 |
| A-135083.1 | 96.5 | 7.2 |
| A-135084.1 | 65.5 | 5.6 |
| A-135085.1 | 52.4 | 3.7 |
| A-135086.1 | 86.0 | 5.5 |
| A-135087.1 | 103.5 | 4.5 |
| A-135088.1 | 46.6 | 5.3 |
| A-135089.1 | 42.5 | 6.7 |
| A-135090.1 | 98.3 | 2.6 |
| A-135091.1 | 94.3 | 3.3 |
| A-135092.1 | 96.9 | 6.7 |
| A-135093.1 | 93.2 | 4.6 |
| A-135094.1 | 82.9 | 8.3 |
| A-135095.1 | 105.2 | 6.6 |
| A-135096.1 | 103.0 | 14.5 |
| A-135097.1 | 104.1 | 10.0 |
| A-135098.1 | 95.9 | 7.7 |
| A-135099.1 | 95.3 | 6.0 |
| A-135100.1 | 48.5 | 3.1 |
| A-135101.1 | 37.1 | 3.6 |
| A-135102.1 | 47.0 | 2.7 |
| A-135103.1 | 72.3 | 2.2 |
| A-135104.1 | 26.5 | 14.0 |
| A-135105.1 | 21.8 | 8.0 |
| A-135106.1 | 28.7 | 6.7 |
| A-135107.1 | 69.0 | 6.2 |
| A-135108.1 | 55.7 | 5.6 |
| A-135109.1 | 51.8 | 6.5 |
| A-135110.1 | 49.9 | 2.5 |
| A-135111.1 | 30.2 | 4.2 |
| A-135112.1 | 86.4 | 11.9 |
| A-135113.1 | 104.9 | 8.1 |
| A-135114.1 | 59.7 | 15.3 |
| A-135115.1 | 29.6 | 15.0 |
| A-135116.1 | 110.1 | 46.8 |
| A-135117.1 | 85.2 | 32.9 |
| A-135118.1 | 103.0 | 35.6 |
| A-135119.1 | 79.7 | 10.4 |
| A-135120.1 | 59.6 | 9.2 |
| A-135121.1 | 85.6 | 8.7 |
| A-135122.1 | 95.5 | 9.1 |
| A-135123.1 | 53.2 | 6.0 |
| A-135124.1 | 103.4 | 12.8 |
| A-135125.1 | 123.4 | 6.8 |
| A-135126.1 | 82.6 | 6.6 |
| A-135127.1 | 94.6 | 6.8 |
| A-135128.1 | 54.4 | 3.1 |
| A-135129.1 | 71.3 | 3.2 |
| A-135130.1 | 60.3 | 4.0 |
| A-135131.1 | 109.4 | 16.5 |
| A-135132.1 | 96.4 | 7.2 |
| A-135133.1 | 47.9 | 3.2 |
| A-135134.1 | 44.4 | 7.6 |
| A-135135.1 | 73.8 | 5.6 |
| A-135136.1 | 31.7 | 5.8 |
| A-135137.1 | 50.5 | 17.5 |
| A-135138.1 | 41.8 | 5.2 |
| A-135139.1 | 73.0 | 16.4 |
| A-135140.1 | 85.9 | 17.2 |
| A-135141.1 | 108.2 | 28.6 |
| A-135142.1 | 109.1 | 37.9 |
| A-135143.1 | 36.0 | 2.1 |
| A-135144.1 | 18.8 | 4.0 |
| A-135145.1 | 31.3 | 3.5 |
| A-135146.1 | 61.7 | 5.8 |
| A-135147.1 | 73.3 | 3.6 |
| A-135148.1 | 33.5 | 3.9 |
| A-135149.1 | 91.5 | 2.5 |
| A-135150.1 | 96.6 | 16.5 |
| A-135151.1 | 91.0 | 2.1 |
| A-135152.1 | 56.7 | 2.8 |
| A-135153.1 | 24.3 | 2.0 |
| A-135154.1 | 38.7 | 5.7 |
| A-135155.1 | 83.8 | 7.3 |
| A-135156.1 | 121.4 | 14.0 |
| A-135157.1 | 74.0 | 10.3 |
| A-135158.1 | 111.4 | 16.8 |
| A-135159.1 | 96.6 | 6.7 |
| A-135160.1 | 114.3 | 7.5 |
| A-135161.1 | 114.6 | 16.2 |
| A-135162.1 | 109.0 | 11.7 |
| A-135163.1 | 99.4 | 8.6 |
| A-135164.1 | 133.9 | 5.3 |
| A-135165.1 | 153.6 | 9.7 |
| A-135166.1 | 115.6 | 2.7 |
| A-135167.1 | 142.6 | 5.9 |
| A-135168.1 | 101.3 | 8.5 |
| A-135169.1 | 123.3 | 6.4 |
| A-135170.1 | 110.7 | 2.8 |
| A-135171.1 | 99.1 | 2.5 |
| A-135172.1 | 111.4 | 2.3 |
| A-135173.1 | 127.8 | 3.9 |
| A-135174.1 | 99.7 | 4.6 |
| A-135175.1 | 127.0 | 11.4 |
| A-135176.1 | 101.2 | 5.1 |

### Example 3: In Vivo AGT Silencing in a Mouse Expressing hAGT

[0459] Experiments are performed to assess hAGT target knockdown in a mouse expressing hAGT from an AAV8 expression vector which has a strong liver tropism. Briefly, mice are infected with 1 × 10¹¹ AAV8 particles containing an expression construct for human AAV under the control of a constitutive promoter. Two weeks after infection with the AAV8 virus, mice are administered a single dose of various amounts of a polynucleotide agent targeting AGT or PBS as a control. The level of expression of hAGT is assessed by qPCR and ELISA of liver tissue at predetermined time points after administration of the polynucleotide agent. Polynucleotide agents with the most potent hAGT knockdown activity are selected for further testing.

### Example 4. In Vivo AGT Silencing - Amelioration of Preeclamptic Sequelae

[0460] Transgenic female Sprague-Dawley rats harboring the complete genomic human AGT gene (e.g., [TGR(hAGT)L1623] (see, e.g., Bohlender J,, et al. (1996) Hypertension 27: 535-540 and Bohlender J,, et al. (2000) J Am Soc Nephrol 11: 2056-2061)) are surgically implanted with a device for measuring blood pressure by telemetry. Subsequent to recovery from the procedure, these rats are mated with transgenic male Sprague-Dawley rats harboring the entire genomic human REN gene (e.g., [TGR(hREN)L10J] (see, e.g., Bohlender J, et al. (1997) Hypertension 29: 428-434 and Bohlender J,, et al. (2000) J Am Soc Nephrol 11: 2056-2061)). The female progeny of this cross (referred to herein as “PE rats”) are a model of preeclampsia and develop albuminuria and intrauterine growth restriction (IUGR), and have a blood pressure spike beginning around gestation day 13.

[0461] Beginning on day 3 of gestation, a subset of pregnant PE rats are administered an appropriate dose of a polynucleotide agent provided herein targeting AGT. A second subset of pregnant PE rats are left untreated as a control. Dosing is continued to gestation day 15. Rats are sacrificed on about day 19 of gestation, and blood and tissue samples are collected from the mothers and the fetuses.

[0462] Maternal blood pressure is monitored throughout the experiment via the surgically implanted devices for measuring blood pressure by telemetry. Treatment with the polynucleotide agent results in significantly lowered mean arterial blood pressure. In addition, as determined by ELISA analysis of serum albumin, maternal albuminuria is significantly reduced following administration of the polynucleotide agent targeting AGT. These two conditions are the hallmarks of preeclampsia. The reduced blood pressure reduces cardiovascular events associated with the disease, while reduced albuminuria is indicative of improved renal function.

[0463] Preeclampsia is also associated with reduced placental size, possibly related to poor perfusion. As a result of the condition, fetal growth is impaired. Following maternal administration of the polynucleotide agent targeting AGT, however, uteroplacental unit weight and fetal weight are increased, and there is normalization of the fetal brain:liver ratio, all indicative of a more normal placental and fetal development.

[0464] As determined by RT-qPCR analysis, mRNA expression of hAGT in maternal liver and placenta, it is shown that, while there is substantial silencing of hAGT in the maternal liver, there was no significant silencing in the placenta. This indicates a lack of penetration of the polynucleotide agent into the placenta.

[0465] In addition, analysis of maternal liver samples, placenta samples, and fetal liver samples demonstrates that the exposure of the fetal liver to the iRNA is more than 100-fold lower than the exposure to the maternal liver. Tissue exposure can be determined, for example, by stem-loop qPCR, as previously described (see, e.g., Landesman, Y., et al. (2010) Silence 1:16).

[0466] Thus, maternal treatment with an antisense polynucleotide agent targeting hAGT is superior to maternal treatment with small-molecule renin-angiotensin inhibitors, such as ACE inhibitors, and angiotensin receptor blockers, as these compounds cross the placenta and are fetotoxic.

[0467] As the placenta acts as the conduit for nutrients to the fetus, and waste removal from the fetus, its composition is critical. Accordingly, placental pathology is evaluated (i.e., by measuring the area of tissue slices immunohistochemically stained for cytokeratin). While the maternal portion of the placenta (the mesometrial triangle) and the trophospongium (a uniform layer of cells which are precursors of differentiated trophoblasts) are unchanged by administration of the polynucleotide agent targeted to AGT, overall placental size is increased. In particular, the size of the villous placenta, which is the site of nutritional exchange between fetal and maternal blood, is increased by maternal treatment with the polynucleotide agent targeted to AGT.

[0468] Regulators of angiotensins, such as the anti-angiogenic soluble fms-like tyrosine kinase-1 (sFLT1) and the angiogenic placental growth factor (PLGF), play a key role in preeclampsia, being released from the placenta into the maternal blood stream and causing endothelial dysfunction. sFlt-1, is largely released from the placenta into the maternal blood stream and causes endothelial dysfunction. PLGF is placental derived, and promotes angiogenesis. The ratio of sFlt-1:PLGF is diagnostic, with a higher sFlt-1:PLGF associated with more severe disease.

[0469] Evaluation of the mRNA expression of sFLT1 and PLGF by RT-qPCR analysis demonstrates that the levels of both sFLT1 and PLGF are significantly reduced in the maternal kidney, but remain unchanged in the placenta following maternal administration of the polynucleotide agent targeted to AGT. However, as sFlt-1 is reduced to a greater extent than PLGF in the maternal kidney, the serum sFlt-1:PLGF ratio may be improved.

[0470] Agonistic autoantibodies to the angiotensin II receptor type I (AT1) have been identified in preeclamptic women. When pregnant rodents are exposed to AT1 autoantibodies, a preeclampsia-like syndrome develops. As activation of AT1 is associated with vasopressor effects as well as aldosterone secretion and sFlt-1 production, reduction of AT1 autoantibodies would be expected to reduce the preeclamptic phenotype. Accordingly, the level of production of agonistic autoantibodies to the AT1 receptor (AT1-AA) may also be evaluated by biochromatography and subsequent bioassay of isolated antibodies. AT1-AA levels are measured as has been described (see, e.g., Dechend, et al. (2005) Hypertension 45:742-746) by assessing the impact of isolated, purified AT1-AA antibodies on the spontaneous beating rate of neonatal rat cardiomyocytes. A significant reduction in the level of AT1-AA following administration of the polynucleotide agent targeting AGT to pregnant PE rats is observed.

### Example 5. In Vivo AGT Silencing in a Transgenic Rat Model of Preeclampsia

[0471] Polynucleotide agents targeting AGT are tested for the ability to silence hAGT expression in pregnant transgenic female Sprague-Dawley rats harboring the complete genomic human AGT gene (e.g., [TGR(hAGT)L1623]) described above. Beginning on day 3 of gestation, a subset of pregnant PE rats are administered appropriate doses of the polynucleotide agent targeted to AGT. Liver and blood are collected at gestation day 21 and levels of hAGT and rAGT protein and mRNA are assayed and compared to untreated, pregnant transgenic rats, and both pregnant and non-pregnant Sprague-Dawley rats. A significant reduction of circulating AT2 and hAT1 are observed in the pregnant PE rats treated with the polynucleotide agent targeting to AGT as compared to control pregnant PE rats. A significant reduction of rat AT2, although less than the reduction observed for human AGT, is also observed in the pregnant PE rats treated with the polynucleotide agent targeting AGT as compared to control pregnant PE rats. Significant silencing of hepatic AGT mRNA is observed in the pregnant PE rats treated with the polynucleotide agent targeting AGT as compared to control pregnant PE rats. A significant reduction in the serum level of AT1 and AT2 following administration of the polynucleotide agent targeting AGT to pregnant PE rats.

### INFORMAL SEQEUNCE LISTING

[0472] <210> 1
[0473] <211> 2587
[0474] <212> DNA
[0475] <213> Homo sapiens
[0476] <400> 1

atcccatgag cgggcagcag ggtcagaagt ggcccccgtg ttgcctaagc aagactctcc 60
cctgccctct gccctctgca cctccggcct gcatgtccct gtggcctctt gggggtacat 120
ctcccggggc tgggtcagaa ggcctgggtg gttggcctca ggctgtcaca cacctaggga 180
gatgctcccg tttctgggaa ccttggcccc gactcctgca aacttcggta aatgtgtaac 240
tcgaccctgc accggctcac tctgttcagc agtgaaactc tgcatcgatc actaagactt 300
cctggaagag gtcccagcgt gagtgtcgct tctggcatct gtccttctgg ccagcctgtg 360
gtctggccaa gtgatgtaac cctcctctcc agcctgtgca caggcagcct gggaacagct 420
ccatccccac ccctcagcta taaatagggc atcgtgaccc ggccggggga agaagctgcc 480
gttgttctgg gtactacagc agaagggtat gcggaagcga gcaccccagt ctgagatggc 540
tcctgccggt gtgagcctga gggccaccat cctctgcctc ctggcctggg ctggcctggc 600
tgcaggtgac cgggtgtaca tacacccctt ccacctcgtc atccacaatg agagtacctg 660
tgagcagctg gcaaaggcca atgccgggaa gcccaaagac cccaccttca tacctgctcc 720
aattcaggcc aagacatccc ctgtggatga aaaggcccta caggaccagc tggtgctagt 780
cgctgcaaaa cttgacaccg aagacaagtt gagggccgca atggtcggga tgctggccaa 840
cttcttgggc ttccgtatat atggcatgca cagtgagcta tggggcgtgg tccatggggc 900
caccgtcctc tccccaacgg ctgtctttgg caccctggcc tctctctatc tgggagcctt 960
ggaccacaca gctgacaggc tacaggcaat cctgggtgtt ccttggaagg acaagaactg 1020
cacctcccgg ctggatgcgc acaaggtcct gtctgccctg caggctgtac agggcctgct 1080
agtggcccag ggcagggctg atagccaggc ccagctgctg ctgtccacgg tggtgggcgt 1140
gttcacagcc ccaggcctgc acctgaagca gccgtttgtg cagggcctgg ctctctatac 1200
ccctgtggtc ctcccacgct ctctggactt cacagaactg gatgttgctg ctgagaagat 1260
tgacaggttc atgcaggctg tgacaggatg gaagactggc tgctccctga tgggagccag 1320
tgtggacagc accctggctt tcaacaccta cgtccacttc caagggaaga tgaagggctt 1380
ctccctgctg gccgagcccc aggagttctg ggtggacaac agcacctcag tgtctgttcc 1440
catgctctct ggcatgggca ccttccagca ctggagtgac atccaggaca acttctcggt 1500
gactcaagtg cccttcactg agagcgcctg cctgctgctg atccagcctc actatgcctc 1560
tgacctggac aaggtggagg gtctcacttt ccagcaaaac tccctcaact ggatgaagaa 1620
actatctccc cggaccatcc acctgaccat gccccaactg gtgctgcaag gatcttatga 1680
cctgcaggac ctgctcgccc aggctgagct gcccgccatt ctgcacaccg agctgaacct 1740
gcaaaaattg agcaatgacc gcatcagggt gggggaggtg ctgaacagca ttttttttga 1800
gcttgaagcg gatgagagag agcccacaga gtctacccaa cagcttaaca agcctgaggt 1860
cttggaggtg accctgaacc gcccattcct gtttgctgtg tatgatcaaa gcgccactgc 1920
cctgcacttc ctgggccgcg tggccaaccc gctgagcaca gcatgaggcc agggccccag 1980
aacacagtgc ctggcaaggc ctctgcccct ggcctttgag gcaaaggcca gcagcagata 2040
acaaccccgg acaaatcagc gatgtgtcac ccccagtctc ccaccttttc ttctaatgag 2100
tcgactttga gctggaaagc agccgtttct ccttggtcta agtgtgctgc atggagtgag 2160
cagtagaagc ctgcagcggc acaaatgcac ctcccagttt gctgggttta ttttagagaa 2220
tgggggtggg gaggcaagaa ccagtgttta gcgcgggact actgttccaa aaagaattcc 2280
aaccgaccag cttgtttgtg aaacaaaaaa gtgttccctt ttcaagttga gaacaaaaat 2340
tgggttttaa aattaaagta tacatttttg cattgccttc ggtttgtatt tagtgtcttg 2400
aatgtaagaa catgacctcc gtgtagtgtc tgtaatacct tagttttttc cacagatgct 2460
tgtgattttt gaacaatacg tgaaagatgc aagcacctga atttctgttt gaatgcggaa 2520
ccatagctgg ttatttctcc cttgtgttag taataaacgt cttgccacaa taagcctcca 2580
aaaaaaa 2587

[0477] <210> 2
[0478] <211> 1834
[0479] <212> DNA
[0480] <213> Macaca fascicularis
[0481] <400> 2

aagaagctgc cattgttctg ggtactacag cagaagggta tgcagaagcg agcaccccag 60
tccgagatgg ctcctgccag cgtgagcctg agggccacca tcctctgcct cctggcctgg 120
gctggcctgg ccacaggtga ccgggtgtac atacacccct tccacctcgt catccacaat 180
gagagtacct gtgagcagct ggcaaaggcc gatgctggga agcccaaaga tcccaccttc 240
acacctgttc cgatacaggc caagacgtct cctgtggatg aaaaggccct gcaggaccag 300
ctagtgctgg ttgccgcaaa actcgacacc gaggacaagt tgagagccgc gatggtcggg 360
atgctggcca acttcttggg cttccgtata tatggcatgc acagtgagct atggggcgtg 420
gtccatgggg ccaccatcct ctccccaacg gctgtctttg gcaccctggc ctctctctac 480
ctgggagcgt tggaccacac agccgacagg ctacaggcaa tcctgggcgt cccttggaag 540
gacaagaact gcacctcccg gctggatgcg cacaaggtcc tctctgccct gcaggctgta 600
cagggcctgc tggtggccca gggcagggct gacggccagt cccagctgct gttgtccaca 660
gtggtgggtc tcttcacagc cccagatctg cacctgaagc agccgtttgt gcagggcctg 720
gctctctatg cccctgtggt cctcccacgc tctctggact tcacagacct ggaagtcgct 780
gctgagaaga ttgacaggtt catgcaggct gtgacaggat ggaagattag cagccccctg 840
acgggagcca gtgcggacag caccctggtt ttcaacacct acgtccattt ccaagggaag 900
atgagggact tcttcctgct ggctgagccc caggagttct gggtggacaa cagcacctca 960
gtgtctgtcc ccatgctgtc tggcgtgggc accttccagc actggagcga cgcccaggac 1020
aacttctcag tgactcaagt gccctttact gagagcgcct gcttgctgct gattcagcct 1080
cactacgcct ctgacctgga caaggtggag ggtctcactt tccagcaaaa ctccctcaac 1140
tggatgaaga aactgtctcc ccgggccatc cacctgacca tgccccgact ggtgctgcga 1200
ggatcttatg acctgcagga cctgcttgcc caggctgagc tgcccgccat tctgggcacc 1260
gagctgaacc tgcaaaaatt gagcaatgac aacctcaggg tggggaaggt gctgaacagc 1320
attctttttg aactcgaagc ggatgagaga gagcccacag agtctacccg acagctgaac 1380
aggcctgagt tcttggaggt gaccctggac cgcccattcc tgtttgctgt gtatgatcaa 1440
agtgccactg ccctgcactt cctgggccgt gtggccaacc cgctgagccc agcatgaggc 1500
cagggcccca gaacacagcg cctggcaagg cctctgcccc tggcctttga ggcgaaggcc 1560
agcagcagat atgtaactct ggaaaaacca gcgatttgtc acccccagtc tcccaccttt 1620
tcttctaatg agtcaacttc gagctggaaa gcagtcgttt ctccttggtc taagtggtgc 1680
tgcgtgagca gtaagaaacc tgtggcagca caaatgcgcc tcccaggttg ctgggtttat 1740
tttagagaat gggggtgggg aggcaagaac cagtgtttag cgcgggacca ccgttccaaa 1800
aagaattcca accgaccagc ttgtttgtga aaca 1834

[0482] <210> 3
[0483] <211> 1856
[0484] <212> DNA
[0485] <213> Mus musculus
[0486] <400> 3

gatagctgtg cttgtctagg ttggcgctga aggatacaca gaagcaaatg cacagatcgg 60
agatgactcc cacgggggca ggcctgaagg ccaccatctt ctgcatcttg acctgggtca 120
gcctgacggc tggggaccgc gtatacatcc accccttcca tctcctttac cacaacaaga 180
gcacctgcgc ccagctggag aaccccagtg tggagacact cccagagtca acgttcgagc 240
ctgtgcccat tcaggccaag acctcccctg tgaatgagaa gaccctgcat gatcagctcg 300
tgctggccgc cgagaagcta gaggatgagg accggaagcg ggctgcccag gtcgcaatga 360
tcgccaactt cgtgggcttc cgcatgtaca agatgctgaa tgaggcagga agtggggcca 420
gtggggccat cctctcacca ccagctctct ttggcaccct ggtctctttc taccttggat 480
ccttagatcc cacggccagc cagctgcaga cgctgctgga tgtccctgtg aaggagggag 540
actgcacctc ccgactagat ggacacaagg tcctcgctgc cctgcgggcc attcagggct 600
tgctggtcac ccagggtggg agcagcagcc agacacccct gctacagtcc attgtggtgg 660
ggctcttcac tgctccaggc tttcgtctaa agcactcatt tgttcagagc ctggctctct 720
ttacccctgc cctcttccca cgctctctgg atttatccac tgacccagtt cttgccactg 780
agaaaatcaa caggttcata aaggctgtga cagggtggaa gatgaacttg ccactggagg 840
gggtcagtac agacagcacc ctacttttca acacctacgt tcacttccaa ggaacgatga 900
gaggtttctc tcagctgcct ggagtccatg aattctgggt ggacaacagc atctcggtgt 960
ctgtgcccat gatctccggc actggcaact tccagcactg gagtgacacc cagaacaact 1020
tctccgtgac gtgcgtgccc ctaggtgaga gagccaccct gctgctcatc cagccccact 1080
gcacctcaga tctcgacagg gtggaggccc tcatcttccg gaacgacctc ctgacttgga 1140
tagagaaccc gcctcctcgg gccatccgcc tgactctgcc ccagctggaa atccgaggat 1200
cctacaatct gcaggacctg ctggctgagg acaagctgcc cacccttttg ggtgcggagg 1260
caaatctgaa caacattggt gacaccaacc cccgagtggg agaggttctc aatagcatcc 1320
tcctcgaact caaagcagga gaggaggaac agccgaccac gtctgtccag cagcctggct 1380
caccggaggc actggatgtg accctgagca gccccttcct gttcgccatc tacgagcagg 1440
actcaggcac gctgcacttt ctgggcagag tgaataaccc ccagagtgtg gtgtgaggcc 1500
ttgtgcctag ccatggagac aaggccggtg tcggagaacc gttctgggca aaactcagtg 1560
ctgtcacccc tggctcccca tcacgccttg tagcgcggca gaggccgtct ccttggagac 1620
tgcgctgacc gagaataaat gatgagcagc agagcctcct gggatgtggg tttgtttgga 1680
tactggggtg acagccagaa gctggcactc tgcacaggac tgccactctg gaagaaattt 1740
ggaccaaaaa actgtttgtg acaccaaaaa gcaccccccc ttttttttat ttgaggacag 1800
aaattgggtt ttaacattaa aatgcacatt atccccttaa aaaaaaaaaa aaaaaa 1856

[0487] <210> 4
[0488] <211> 1958
[0489] <212> DNA
[0490] <213> Rattus norvegicus
[0491] <400> 4

ccttgctcca tcttggctaa gcctggattc ccatggtccc ccgacctggg tcctccccca 60
gcctctgtac agagtagcct gggaatagat ccatcttcac cccctcgagt ataaataagg 120
ctgcttggtt caccagggga tagctgtgct tgtctgggct ggagctaaag gacacacaga 180
agcaagtcca cagatccgtg atgactccca cgggggcagg cctgaaggcc accatcttct 240
gcatcctgac ctgggtcagc ctgacagctg gggaccgcgt atacatccac ccctttcatc 300
tcctctacta cagcaagagc acctgcgccc agctggagaa ccccagtgtg gagacgctcc 360
cagagccaac ctttgagcct gtgcccattc aggccaagac ctcccccgtg gatgagaaga 420
ccctgcgaga taagctcgtg ctggccactg agaagctaga ggctgaggat cggcagcgag 480
ctgcccaggt cgcgatgatt gccaacttca tgggtttccg catgtacaag atgctgagtg 540
aggcaagagg tgtagccagt ggggccgtcc tctctccacc ggccctcttt ggcaccctgg 600
tctctttcta ccttggatcg ttggatccca cggccagcca gttgcaggtg ctgctgggcg 660
tccctgtgaa ggagggagac tgcacctccc ggctggacgg acataaggtc ctcactgccc 720
tgcaggctgt tcagggcttg ctggtcaccc agggtggaag cagcagccag acacccctgc 780
tacagtccac cgtggtgggc ctcttcactg ccccaggctt gcgcctaaaa cagccatttg 840
ttgagagctt gggtcccttc acccccgcca tcttccctcg ctctctggac ttatccactg 900
acccagttct tgctgcccag aaaatcaaca ggtttgtgca ggctgtgaca gggtggaaga 960
tgaacttgcc actagagggg gtcagcacgg acagcaccct atttttcaac acctacgttc 1020
acttccaagg gaagatgaga ggcttctccc agctgactgg gctccatgag ttctgggtgg 1080
acaacagcac ctcagtgtct gtgcccatgc tctcgggcac tggcaacttc cagcactgga 1140
gtgacgccca gaacaacttc tccgtgacac gcgtgcccct gggtgagagt gtcaccctgc 1200
tgctgatcca gccccagtgc gcctcagatc tcgacagggt ggaggtcctc gtcttccagc 1260
acgacttcct gacttggata aagaacccgc ctcctcgggc catccgtctg accctgccgc 1320
agctggaaat tcggggatcc tacaacctgc aggacctgct ggctcaggcc aagctgtcta 1380
cccttttggg tgctgaggca aatctgggca agatgggtga caccaacccc cgagtgggag 1440
aggttctcaa cagcatcctc cttgaactcc aagcaggcga ggaggagcag cccacagagt 1500
ctgcccagca gcctggctca cccgaggtgc tggacgtgac cctgagcagt ccgttcctgt 1560
tcgccatcta cgagcgggac tcaggtgcgc tgcactttct gggcagagtg gataaccccc 1620
aaaatgtggt gtgatgcctc ctgtgtagcc atggagacaa ggccagcgtc agagagctat 1680
cctgggcaaa aatcagtgcc ttcacccctg gcttcccgtc actccttcca gcaaggcaga 1740
ggccgtctcc ttggagatgg cgctaactga gaataaatga tgagcagcag cctcctgggg 1800
tgtgggtttg tttggacact ggggtgagag ccaggagctg gcactctgta taggaggact 1860
gccatcctgg aaaaaaaaaa tggaccaaac aactgtttgt gaaataaaaa aaaaaaaatt 1920
ccctttttat ttgaaaaaaa aaaaaaaaaa aaaaa 1958

The application's sequence listing, which the Patent Office published only in electronic form, follows.

SEQUENCE LISTING (241 sequences)

SEQ ID NO: 1 - DNA, 2587 bp, Homo sapiens
  source 1..2587: mol_type = unassigned DNA
atcccatgagcgggcagcagggtcagaagtggcccccgtgttgcctaagcaagactctcccctgccctctgccctctgcacctccggcctgcatgtccctgtggcctcttgggggtacatctcccggggctgggtcagaaggcctgggtggttggcctcaggctgtcacacacctagggagatgctcccgtttctgggaaccttggccccgactcctgcaaacttcggtaaatgtgtaactcgaccctgcaccggctcactctgttcagcagtgaaactctgcatcgatcactaagacttcctggaagaggtcccagcgtgagtgtcgcttctggcatctgtccttctggccagcctgtggtctggccaagtgatgtaaccctcctctccagcctgtgcacaggcagcctgggaacagctccatccccacccctcagctataaatagggcatcgtgacccggccgggggaagaagctgccgttgttctgggtactacagcagaagggtatgcggaagcgagcaccccagtctgagatggctcctgccggtgtgagcctgagggccaccatcctctgcctcctggcctgggctggcctggctgcaggtgaccgggtgtacatacaccccttccacctcgtcatccacaatgagagtacctgtgagcagctggcaaaggccaatgccgggaagcccaaagaccccaccttcatacctgctccaattcaggccaagacatcccctgtggatgaaaaggccctacaggaccagctggtgctagtcgctgcaaaacttgacaccgaagacaagttgagggccgcaatggtcgggatgctggccaacttcttgggcttccgtatatatggcatgcacagtgagctatggggcgtggtccatggggccaccgtcctctccccaacggctgtctttggcaccctggcctctctctatctgggagccttggaccacacagctgacaggctacaggcaatcctgggtgttccttggaaggacaagaactgcacctcccggctggatgcgcacaaggtcctgtctgccctgcaggctgtacagggcctgctagtggcccagggcagggctgatagccaggcccagctgctgctgtccacggtggtgggcgtgttcacagccccaggcctgcacctgaagcagccgtttgtgcagggcctggctctctatacccctgtggtcctcccacgctctctggacttcacagaactggatgttgctgctgagaagattgacaggttcatgcaggctgtgacaggatggaagactggctgctccctgatgggagccagtgtggacagcaccctggctttcaacacctacgtccacttccaagggaagatgaagggcttctccctgctggccgagccccaggagttctgggtggacaacagcacctcagtgtctgttcccatgctctctggcatgggcaccttccagcactggagtgacatccaggacaacttctcggtgactcaagtgcccttcactgagagcgcctgcctgctgctgatccagcctcactatgcctctgacctggacaaggtggagggtctcactttccagcaaaactccctcaactggatgaagaaactatctccccggaccatccacctgaccatgccccaactggtgctgcaaggatcttatgacctgcaggacctgctcgcccaggctgagctgcccgccattctgcacaccgagctgaacctgcaaaaattgagcaatgaccgcatcagggtgggggaggtgctgaacagcattttttttgagcttgaagcggatgagagagagcccacagagtctacccaacagcttaacaagcctgaggtcttggaggtgaccctgaaccgcccattcctgtttgctgtgtatgatcaaagcgccactgccctgcacttcctgggccgcgtggccaacccgctgagcacagcatgaggccagggccccagaacacagtgcctggcaaggcctctgcccctggcctttgaggcaaaggccagcagcagataacaaccccggacaaatcagcgatgtgtcacccccagtctcccaccttttcttctaatgagtcgactttgagctggaaagcagccgtttctccttggtctaagtgtgctgcatggagtgagcagtagaagcctgcagcggcacaaatgcacctcccagtttgctgggtttattttagagaatgggggtggggaggcaagaaccagtgtttagcgcgggactactgttccaaaaagaattccaaccgaccagcttgtttgtgaaacaaaaaagtgttcccttttcaagttgagaacaaaaattgggttttaaaattaaagtatacatttttgcattgccttcggtttgtatttagtgtcttgaatgtaagaacatgacctccgtgtagtgtctgtaataccttagttttttccacagatgcttgtgatttttgaacaatacgtgaaagatgcaagcacctgaatttctgtttgaatgcggaaccatagctggttatttctcccttgtgttagtaataaacgtcttgccacaataagcctccaaaaaaaa

SEQ ID NO: 2 - DNA, 1834 bp, Macaca fascicularis
  source 1..1834: mol_type = unassigned DNA
aagaagctgccattgttctgggtactacagcagaagggtatgcagaagcgagcaccccagtccgagatggctcctgccagcgtgagcctgagggccaccatcctctgcctcctggcctgggctggcctggccacaggtgaccgggtgtacatacaccccttccacctcgtcatccacaatgagagtacctgtgagcagctggcaaaggccgatgctgggaagcccaaagatcccaccttcacacctgttccgatacaggccaagacgtctcctgtggatgaaaaggccctgcaggaccagctagtgctggttgccgcaaaactcgacaccgaggacaagttgagagccgcgatggtcgggatgctggccaacttcttgggcttccgtatatatggcatgcacagtgagctatggggcgtggtccatggggccaccatcctctccccaacggctgtctttggcaccctggcctctctctacctgggagcgttggaccacacagccgacaggctacaggcaatcctgggcgtcccttggaaggacaagaactgcacctcccggctggatgcgcacaaggtcctctctgccctgcaggctgtacagggcctgctggtggcccagggcagggctgacggccagtcccagctgctgttgtccacagtggtgggtctcttcacagccccagatctgcacctgaagcagccgtttgtgcagggcctggctctctatgcccctgtggtcctcccacgctctctggacttcacagacctggaagtcgctgctgagaagattgacaggttcatgcaggctgtgacaggatggaagattagcagccccctgacgggagccagtgcggacagcaccctggttttcaacacctacgtccatttccaagggaagatgagggacttcttcctgctggctgagccccaggagttctgggtggacaacagcacctcagtgtctgtccccatgctgtctggcgtgggcaccttccagcactggagcgacgcccaggacaacttctcagtgactcaagtgccctttactgagagcgcctgcttgctgctgattcagcctcactacgcctctgacctggacaaggtggagggtctcactttccagcaaaactccctcaactggatgaagaaactgtctccccgggccatccacctgaccatgccccgactggtgctgcgaggatcttatgacctgcaggacctgcttgcccaggctgagctgcccgccattctgggcaccgagctgaacctgcaaaaattgagcaatgacaacctcagggtggggaaggtgctgaacagcattctttttgaactcgaagcggatgagagagagcccacagagtctacccgacagctgaacaggcctgagttcttggaggtgaccctggaccgcccattcctgtttgctgtgtatgatcaaagtgccactgccctgcacttcctgggccgtgtggccaacccgctgagcccagcatgaggccagggccccagaacacagcgcctggcaaggcctctgcccctggcctttgaggcgaaggccagcagcagatatgtaactctggaaaaaccagcgatttgtcacccccagtctcccaccttttcttctaatgagtcaacttcgagctggaaagcagtcgtttctccttggtctaagtggtgctgcgtgagcagtaagaaacctgtggcagcacaaatgcgcctcccaggttgctgggtttattttagagaatgggggtggggaggcaagaaccagtgtttagcgcgggaccaccgttccaaaaagaattccaaccgaccagcttgtttgtgaaaca

SEQ ID NO: 3 - DNA, 1856 bp, Mus musculus
  source 1..1856: mol_type = unassigned DNA
gatagctgtgcttgtctaggttggcgctgaaggatacacagaagcaaatgcacagatcggagatgactcccacgggggcaggcctgaaggccaccatcttctgcatcttgacctgggtcagcctgacggctggggaccgcgtatacatccaccccttccatctcctttaccacaacaagagcacctgcgcccagctggagaaccccagtgtggagacactcccagagtcaacgttcgagcctgtgcccattcaggccaagacctcccctgtgaatgagaagaccctgcatgatcagctcgtgctggccgccgagaagctagaggatgaggaccggaagcgggctgcccaggtcgcaatgatcgccaacttcgtgggcttccgcatgtacaagatgctgaatgaggcaggaagtggggccagtggggccatcctctcaccaccagctctctttggcaccctggtctctttctaccttggatccttagatcccacggccagccagctgcagacgctgctggatgtccctgtgaaggagggagactgcacctcccgactagatggacacaaggtcctcgctgccctgcgggccattcagggcttgctggtcacccagggtgggagcagcagccagacacccctgctacagtccattgtggtggggctcttcactgctccaggctttcgtctaaagcactcatttgttcagagcctggctctctttacccctgccctcttcccacgctctctggatttatccactgacccagttcttgccactgagaaaatcaacaggttcataaaggctgtgacagggtggaagatgaacttgccactggagggggtcagtacagacagcaccctacttttcaacacctacgttcacttccaaggaacgatgagaggtttctctcagctgcctggagtccatgaattctgggtggacaacagcatctcggtgtctgtgcccatgatctccggcactggcaacttccagcactggagtgacacccagaacaacttctccgtgacgtgcgtgcccctaggtgagagagccaccctgctgctcatccagccccactgcacctcagatctcgacagggtggaggccctcatcttccggaacgacctcctgacttggatagagaacccgcctcctcgggccatccgcctgactctgccccagctggaaatccgaggatcctacaatctgcaggacctgctggctgaggacaagctgcccacccttttgggtgcggaggcaaatctgaacaacattggtgacaccaacccccgagtgggagaggttctcaatagcatcctcctcgaactcaaagcaggagaggaggaacagccgaccacgtctgtccagcagcctggctcaccggaggcactggatgtgaccctgagcagccccttcctgttcgccatctacgagcaggactcaggcacgctgcactttctgggcagagtgaataacccccagagtgtggtgtgaggccttgtgcctagccatggagacaaggccggtgtcggagaaccgttctgggcaaaactcagtgctgtcacccctggctccccatcacgccttgtagcgcggcagaggccgtctccttggagactgcgctgaccgagaataaatgatgagcagcagagcctcctgggatgtgggtttgtttggatactggggtgacagccagaagctggcactctgcacaggactgccactctggaagaaatttggaccaaaaaactgtttgtgacaccaaaaagcacccccccttttttttatttgaggacagaaattgggttttaacattaaaatgcacattatccccttaaaaaaaaaaaaaaaaaa

SEQ ID NO: 4 - DNA, 1958 bp, Rattus norvegicus
  source 1..1958: mol_type = unassigned DNA
ccttgctccatcttggctaagcctggattcccatggtcccccgacctgggtcctcccccagcctctgtacagagtagcctgggaatagatccatcttcaccccctcgagtataaataaggctgcttggttcaccaggggatagctgtgcttgtctgggctggagctaaaggacacacagaagcaagtccacagatccgtgatgactcccacgggggcaggcctgaaggccaccatcttctgcatcctgacctgggtcagcctgacagctggggaccgcgtatacatccacccctttcatctcctctactacagcaagagcacctgcgcccagctggagaaccccagtgtggagacgctcccagagccaacctttgagcctgtgcccattcaggccaagacctcccccgtggatgagaagaccctgcgagataagctcgtgctggccactgagaagctagaggctgaggatcggcagcgagctgcccaggtcgcgatgattgccaacttcatgggtttccgcatgtacaagatgctgagtgaggcaagaggtgtagccagtggggccgtcctctctccaccggccctctttggcaccctggtctctttctaccttggatcgttggatcccacggccagccagttgcaggtgctgctgggcgtccctgtgaaggagggagactgcacctcccggctggacggacataaggtcctcactgccctgcaggctgttcagggcttgctggtcacccagggtggaagcagcagccagacacccctgctacagtccaccgtggtgggcctcttcactgccccaggcttgcgcctaaaacagccatttgttgagagcttgggtcccttcacccccgccatcttccctcgctctctggacttatccactgacccagttcttgctgcccagaaaatcaacaggtttgtgcaggctgtgacagggtggaagatgaacttgccactagagggggtcagcacggacagcaccctatttttcaacacctacgttcacttccaagggaagatgagaggcttctcccagctgactgggctccatgagttctgggtggacaacagcacctcagtgtctgtgcccatgctctcgggcactggcaacttccagcactggagtgacgcccagaacaacttctccgtgacacgcgtgcccctgggtgagagtgtcaccctgctgctgatccagccccagtgcgcctcagatctcgacagggtggaggtcctcgtcttccagcacgacttcctgacttggataaagaacccgcctcctcgggccatccgtctgaccctgccgcagctggaaattcggggatcctacaacctgcaggacctgctggctcaggccaagctgtctacccttttgggtgctgaggcaaatctgggcaagatgggtgacaccaacccccgagtgggagaggttctcaacagcatcctccttgaactccaagcaggcgaggaggagcagcccacagagtctgcccagcagcctggctcacccgaggtgctggacgtgaccctgagcagtccgttcctgttcgccatctacgagcgggactcaggtgcgctgcactttctgggcagagtggataacccccaaaatgtggtgtgatgcctcctgtgtagccatggagacaaggccagcgtcagagagctatcctgggcaaaaatcagtgccttcacccctggcttcccgtcactccttccagcaaggcagaggccgtctccttggagatggcgctaactgagaataaatgatgagcagcagcctcctggggtgtgggtttgtttggacactggggtgagagccaggagctggcactctgtataggaggactgccatcctggaaaaaaaaaatggaccaaacaactgtttgtgaaataaaaaaaaaaaaattccctttttatttgaaaaaaaaaaaaaaaaaaaaaaaaa

SEQ ID NO: 5 - protein, 16 aa, unidentified
  source 1..16: note = Description of Unknown: RFGF peptide
AAVALLPAVLLALLAP

SEQ ID NO: 6 - protein, 11 aa, unidentified
  source 1..11: note = Description of Unknown: RFGF analogue sequence
AALLPVLLAAP

SEQ ID NO: 7 - protein, 13 aa, Human immunodeficiency virus
GRKKRRQRRRPPQ

SEQ ID NO: 8 - protein, 16 aa, Drosophila sp.
RQIKIWFQNRRMKWKK

SEQ ID NO: 9 - DNA, 20 bp, synthetic construct
  source 1..20: mol_type = other DNA; note = Description of Artificial Sequence: Synthetic oligonucleotide; note = Description of Combined DNA/RNA Molecule: Synthetic oligonucleotide
  modified_base 1: mod_base = OTHER; note = 2'-O-methyladenosine-3'- phosphorothioate
  modified_base 2: mod_base = OTHER; note = 2'-O-methylcytidine-3'- phosphorothioate
  modified_base 3: mod_base = OTHER; note = 2'-O-methyluridine-3'-phosphorothioate
  modified_base 4: mod_base = OTHER; note = 2'-O-methyluridine-3'-phosphorothioate
  modified_base 5: mod_base = OTHER; note = 2'-O-methylcytidine-3'- phosphorothioate
  modified_base 6: mod_base = OTHER; note = 2'-deoxythymidine-3'-phosphorothioate
  modified_base 7: mod_base = OTHER; note = 2'-deoxyguanosine-3'-phosphorothioate
  modified_base 8: mod_base = OTHER; note = 2'-deoxyadenosine-3'-phosphorothioate
  modified_base 9: mod_base = OTHER; note = 5'-methyl-deoxycytidine-3'-phosphorothioate
  modified_base 10: mod_base = OTHER; note = 5'-methyl-deoxycytidine-3'-phosphorothioate
  modified_base 11: mod_base = OTHER; note = 5'-methyl-deoxycytidine-3'-phosphorothioate
  modified_base 12: mod_base = OTHER; note = 2'-deoxythymidine-3'-phosphorothioate
  modified_base 13: mod_base = OTHER; note = 2'-deoxyguanosine-3'-phosphorothioate
  modified_base 14: mod_base = OTHER; note = 5'-methyl-deoxycytidine-3'-phosphorothioate
  modified_base 15: mod_base = OTHER; note = 2'-deoxythymidine-3'-phosphorothioate
  modified_base 16: mod_base = OTHER; note = 2'-O-methylguanosine-3'- phosphorothioate
  modified_base 17: mod_base = OTHER; note = 2'-O-methylcytidine-3'- phosphorothioate
  modified_base 18: mod_base = OTHER; note = 2'-O-methylcytidine-3'- phosphorothioate
  modified_base 19: mod_base = OTHER; note = 2'-O-methylcytidine-3'- phosphorothioate
  modified_base 20: mod_base = OTHER; note = 2'-O-methylguanosine-3'-phosphate
  misc_feature 1..5: note = RNA
  misc_feature 6..15: note = DNA
  misc_feature 16..20: note = RNA
acttctgaccctgctgcccg

SEQ ID NO: 10 - DNA, 20 bp, synthetic construct
  source 1..20: mol_type = other DNA; note = Description of Artificial Sequence: Synthetic oligonucleotide; note = Description of Combined DNA/RNA Molecule: Synthetic oligonucleotide
  modified_base 1: mod_base = OTHER; note = 2'-O-methyladenosine-3'- phosphorothioate
  modified_base 2: mod_base = OTHER; note = 2'-O-methyladenosine-3'- phosphorothioate
  modified_base 3: mod_base = OTHER; note = 2'-O-methylcytidine-3'- phosphorothioate
  modified_base 4: mod_base = OTHER; note = 2'-O-methyladenosine-3'- phosphorothioate
  modified_base 5: mod_base = OTHER; note = 2'-O-methylcytidine-3'- phosphorothioate
  modified_base 6: mod_base = OTHER; note = 2'-deoxyguanosine-3'-phosphorothioate
  modified_base 7: mod_base = OTHER; note = 2'-deoxyguanosine-3'-phosphorothioate
  modified_base 8: mod_base = OTHER; note = 2'-deoxyguanosine-3'-phosphorothioate
  modified_base 9: mod_base = OTHER; note = 2'-deoxyguanosine-3'-phosphorothioate
  modified_base 10: mod_base = OTHER; note = 2'-deoxyguanosine-3'-phosphorothioate
  modified_base 11: mod_base = OTHER; note = 5'-methyl-deoxycytidine-3'-phosphorothioate
  modified_base 12: mod_base = OTHER; note = 5'-methyl-deoxycytidine-3'-phosphorothioate
  modified_base 13: mod_base = OTHER; note = 2'-deoxyadenosine-3'-phosphorothioate
  modified_base 14: mod_base = OTHER; note = 5'-methyl-deoxycytidine-3'-phosphorothioate
  modified_base 15: mod_base = OTHER; note = 2'-deoxythymidine-3'-phosphorothioate
  modified_base 16: mod_base = OTHER; note = 2'-O-methyluridine-3'-phosphorothioate
  modified_base 17: mod_base = OTHER; note = 2'-O-methylcytidine-3'- phosphorothioate
  modified_base 18: mod_base = OTHER; note = 2'-O-methyluridine-3'-phosphorothioate
  modified_base 19: mod_base = OTHER; note = 2'-O-methylguanosine-3'- phosphorothioate
  modified_base 20: mod_base = OTHER; note = 2'-O-methyladenosine-3'-phosphate
  misc_feature 1..5: note = RNA
  misc_feature 6..15: note = DNA
  misc_feature 16..20: note = RNA
aacacgggggccacttctga

SEQ ID NO: 11 - DNA, 20 bp, synthetic construct
  source 1..20: mol_type = other DNA; note = Description of Artificial Sequence: Synthetic oligonucleotide; note = Description of Combined DNA/RNA Molecule: Synthetic oligonucleotide
  modified_base 1: mod_base = OTHER; note = 2'-O-methyluridine-3'-phosphorothioate
  modified_base 2: mod_base = OTHER; note = 2'-O-methylcytidine-3'- phosphorothioate
  modified_base 3: mod_base = OTHER; note = 2'-O-methyluridine-3'-phosphorothioate
  modified_base 4: mod_base = OTHER; note = 2'-O-methyluridine-3'-phosphorothioate
  modified_base 5: mod_base = OTHER; note = 2'-O-methylguanosine-3'- phosphorothioate
  modified_base 6: mod_base = OTHER; note = 5'-methyl-deoxycytidine-3'-phosphorothioate
  modified_base 7: mod_base = OTHER; note = 2'-deoxythymidine-3'-phosphorothioate
  modified_base 8: mod_base = OTHER; note = 2'-deoxythymidine-3'-phosphorothioate
  modified_base 9: mod_base = OTHER; note = 2'-deoxyadenosine-3'-phosphorothioate
  modified_base 10: mod_base = OTHER; note = 2'-deoxyguanosine-3'-phosphorothioate
  modified_base 11: mod_base = OTHER; note = 2'-deoxyguanosine-3'-phosphorothioate
  modified_base 12: mod_base = OTHER; note = 5'-methyl-deoxycytidine-3'-phosphorothioate
  modified_base 13: mod_base = OTHER; note = 2'-deoxyadenosine-3'-phosphorothioate
  modified_base 14: mod_base = OTHER; note = 2'-deoxyadenosine-3'-phosphorothioate
  modified_base 15: mod_base = OTHER; note = 5'-methyl-deoxycytidine-3'-phosphorothioate
  modified_base 16: mod_base = OTHER; note = 2'-O-methyladenosine-3'- phosphorothioate
  modified_base 17: mod_base = OTHER; note = 2'-O-methylcytidine-3'- phosphorothioate
  modified_base 18: mod_base = OTHER; note = 2'-O-methylguanosine-3'- phosphorothioate
  modified_base 19: mod_base = OTHER; note = 2'-O-methylguanosine-3'- phosphorothioate
  modified_base 20: mod_base = OTHER; note = 2'-O-methylguanosine-3'-phosphate
  misc_feature 1..5: note = RNA
  misc_feature 6..15: note = DNA
  misc_feature 16..20: note = RNA
tcttgcttaggcaacacggg

SEQ ID NO: 12 - DNA, 20 bp, synthetic construct
  source 1..20: mol_type = other DNA; note = Description of Artificial Sequence: Synthetic oligonucleotide; note = Description of Combined DNA/RNA Molecule: Synthetic oligonucleotide
  modified_base 1: mod_base = OTHER; note = 2'-O-methyladenosine-3'- phosphorothioate
  modified_base 2: mod_base = OTHER; note = 2'-O-methylguanosine-3'- phosphorothioate
  modified_base 3: mod_base = OTHER; note = 2'-O-methylguanosine-3'- phosphorothioate
  modified_base 4: mod_base = OTHER; note = 2'-O-methylguanosine-3'- phosphorothioate
  modified_base 5: mod_base = OTHER; note = 2'-O-methylguanosine-3'- phosphorothioate
  modified_base 6: mod_base = OTHER; note = 2'-deoxyadenosine-3'-phosphorothioate
  modified_base 7: mod_base = OTHER; note = 2'-deoxyguanosine-3'-phosphorothioate
  modified_base 8: mod_base = OTHER; note = 2'-deoxyadenosine-3'-phosphorothioate
  modified_base 9: mod_base = OTHER; note = 2'-deoxyguanosine-3'-phosphorothioate
  modified_base 10: mod_base = OTHER; note = 2'-deoxythymidine-3'-phosphorothioate
  modified_base 11: mod_base = OTHER; note = 5'-methyl-deoxycytidine-3'-phosphorothioate
  modified_base 12: mod_base = OTHER; note = 2'-deoxythymidine-3'-phosphorothioate
  modified_base 13: mod_base = OTHER; note = 2'-deoxythymidine-3'-phosphorothioate
  modified_base 14: mod_base = OTHER; note = 2'-deoxyguanosine-3'-phosphorothioate
  modified_base 15: mod_base = OTHER; note = 5'-methyl-deoxycytidine-3'-phosphorothioate
  modified_base 16: mod_base = OTHER; note = 2'-O-methyluridine-3'-phosphorothioate
  modified_base 17: mod_base = OTHER; note = 2'-O-methyluridine-3'-phosphorothioate
  modified_base 18: mod_base = OTHER; note = 2'-O-methyladenosine-3'- phosphorothioate
  modified_base 19: mod_base = OTHER; note = 2'-O-methylguanosine-3'- phosphorothioate
  modified_base 20: mod_base = OTHER; note = 2'-O-methylguanosine-3'-phosphate
  misc_feature 1..5: note = RNA
  misc_feature 6..15: note = DNA
  misc_feature 16..20: note = RNA
aggggagagtcttgcttagg

SEQ ID NO: 13 - DNA, 20 bp, synthetic construct
  source 1..20: mol_type = other DNA; note = Description of Artificial Sequence: Synthetic oligonucleotide; note = Description of Combined DNA/RNA Molecule: Synthetic oligonucleotide
  modified_base 1: mod_base = OTHER; note = 2'-O-methyladenosine-3'- phosphorothioate
  modified_base 2: mod_base = OTHER; note = 2'-O-methylguanosine-3'- phosphorothioate
  modified_base 3: mod_base = OTHER; note = 2'-O-methylguanosine-3'- phosphorothioate
  modified_base 4: mod_base = OTHER; note = 2'-O-methylguanosine-3'- phosphorothioate
  modified_base 5: mod_base = OTHER; note = 2'-O-methylcytidine-3'- phosphorothioate
  modified_base 6: mod_base = OTHER; note = 2'-deoxyadenosine-3'-phosphorothioate
  modified_base 7: mod_base = OTHER; note = 2'-deoxyguanosine-3'-phosphorothioate
  modified_base 8: mod_base = OTHER; note = 2'-deoxyadenosine-3'-phosphorothioate
  modified_base 9: mod_base = OTHER; note = 2'-deoxyguanosine-3'-phosphorothioate
  modified_base 10: mod_base = OTHER; note = 2'-deoxyguanosine-3'-phosphorothioate
  modified_base 11: mod_base = OTHER; note = 2'-deoxyguanosine-3'-phosphorothioate
  modified_base 12: mod_base = OTHER; note = 5'-methyl-deoxycytidine-3'-phosphorothioate
  modified_base 13: mod_base = OTHER; note = 2'-deoxyadenosine-3'-phosphorothioate
  modified_base 14: mod_base = OTHER; note = 2'-deoxyguanosine-3'-phosphorothioate
  modified_base 15: mod_base = OTHER; note = 2'-deoxyguanosine-3'-phosphorothioate
  modified_base 16: mod_base = OTHER; note = 2'-O-methylguanosine-3'- phosphorothioate
  modified_base 17: mod_base = OTHER; note = 2'-O-methylguanosine-3'- phosphorothioate
  modified_base 18: mod_base = OTHER; note = 2'-O-methyladenosine-3'- phosphorothioate
  modified_base 19: mod_base = OTHER; note = 2'-O-methylguanosine-3'- phosphorothioate
  modified_base 20: mod_base = OTHER; note = 2'-O-methyladenosine-3'-phosphate
  misc_feature 1..5: note = RNA
  misc_feature 6..15: note = DNA
  misc_feature 16..20: note = RNA
agggcagagggcaggggaga

SEQ ID NO: 14 - DNA, 20 bp, synthetic construct
  source 1..20: mol_type = other DNA; note = Description of Artificial Sequence: Synthetic oligonucleotide; note = Description of Combined DNA/RNA Molecule: Synthetic oligonucleotide
  modified_base 1: mod_base = OTHER; note = 2'-O-methylcytidine-3'- phosphorothioate
  modified_base 2: mod_base = OTHER; note = 2'-O-methylcytidine-3'- phosphorothioate
  modified_base 3: mod_base = OTHER; note = 2'-O-methylguanosine-3'- phosphorothioate
  modified_base 4: mod_base = OTHER; note = 2'-O-methylguanosine-3'- phosphorothioate
  modified_base 5: mod_base = OTHER; note = 2'-O-methyladenosine-3'- phosphorothioate
  modified_base 6: mod_base = OTHER; note = 2'-deoxyguanosine-3'-phosphorothioate
  modified_base 7: mod_base = OTHER; note = 2'-deoxyguanosine-3'-phosphorothioate
  modified_base 8: mod_base = OTHER; note = 2'-deoxythymidine-3'-phosphorothioate
  modified_base 9: mod_base = OTHER; note = 2'-deoxyguanosine-3'-phosphorothioate
  modified_base 10: mod_base = OTHER; note = 5'-methyl-deoxycytidine-3'-phosphorothioate
  modified_base 11: mod_base = OTHER; note = 2'-deoxyadenosine-3'-phosphorothioate
  modified_base 12: mod_base = OTHER; note = 2'-deoxyguanosine-3'-phosphorothioate
  modified_base 13: mod_base = OTHER; note = 2'-deoxyadenosine-3'-phosphorothioate
  modified_base 14: mod_base = OTHER; note = 2'-deoxyguanosine-3'-phosphorothioate
  modified_base 15: mod_base = OTHER; note = 2'-deoxyguanosine-3'-phosphorothioate
  modified_base 16: mod_base = OTHER; note = 2'-O-methylguanosine-3'- phosphorothioate
  modified_base 17: mod_base = OTHER; note = 2'-O-methylcytidine-3'- phosphorothioate
  modified_base 18: mod_base = OTHER; note = 2'-O-methyladenosine-3'- phosphorothioate
  modified_base 19: mod_base = OTHER; note = 2'-O-methylguanosine-3'- phosphorothioate
  modified_base 20: mod_base = OTHER; note = 2'-O-methyladenosine-3'-phosphate
  misc_feature 1..5: note = RNA
  misc_feature 6..15: note = DNA
  misc_feature 16..20: note = RNA
ccggaggtgcagagggcaga

SEQ ID NO: 15 - DNA, 20 bp, synthetic construct
  source 1..20: mol_type = other DNA; note = Description of Artificial Sequence: Synthetic oligonucleotide; note = Description of Combined DNA/RNA Molecule: Synthetic oligonucleotide
  modified_base 1: mod_base = OTHER; note = 2'-O-methyladenosine-3'- phosphorothioate
  modified_base 2: mod_base = OTHER; note = 2'-O-methylcytidine-3'- phosphorothioate
  modified_base 3: mod_base = OTHER; note = 2'-O-methyladenosine-3'- phosphorothioate
  modified_base 4: mod_base = OTHER; note = 2'-O-methyluridine-3'-phosphorothioate
  modified_base 5: mod_base = OTHER; note = 2'-O-methylguanosine-3'- phosphorothioate
  modified_base 6: mod_base = OTHER; note = 5'-methyl-deoxycytidine-3'-phosphorothioate
  modified_base 7: mod_base = OTHER; note = 2'-deoxyadenosine-3'-phosphorothioate
  modified_base 8: mod_base = OTHER; note = 2'-deoxyguanosine-3'-phosphorothioate
  modified_base 9: mod_base = OTHER; note = 2'-deoxyguanosine-3'-phosphorothioate
  modified_base 10: mod_base = OTHER; note = 5'-methyl-deoxycytidine-3'-phosphorothioate
  modified_base 11: mod_base = OTHER; note = 5'-methyl-deoxycytidine-3'-phosphorothioate
  modified_base 12: mod_base = OTHER; note = 2'-deoxyguanosine-3'-phosphorothioate
  modified_base 13: mod_base = OTHER; note = 2'-deoxyguanosine-3'-phosphorothioate
  modified_base 14: mod_base = OTHER; note = 2'-deoxyadenosine-3'-phosphorothioate
  modified_base 15: mod_base = OTHER; note = 2'-deoxyguanosine-3'-phosphorothioate
  modified_base 16: mod_base = OTHER; note = 2'-O-methylguanosine-3'- phosphorothioate
  modified_base 17: mod_base = OTHER; note = 2'-O-methyluridine-3'-phosphorothioate
  modified_base 18: mod_base = OTHER; note = 2'-O-methylguanosine-3'- phosphorothioate
  modified_base 19: mod_base = OTHER; note = 2'-O-methylcytidine-3'- phosphorothioate
  modified_base 20: mod_base = OTHER; note = 2'-O-methyladenosine-3'-phosphate
  misc_feature 1..5: note = RNA
  misc_feature 6..15: note = DNA
  misc_feature 16..20: note = RNA
acatgcaggccggaggtgca

SEQ ID NO: 16 - DNA, 20 bp, synthetic construct
  source 1..20: mol_type = other DNA; note = Description of Artificial Sequence: Synthetic oligonucleotide; note = Description of Combined DNA/RNA Molecule: Synthetic oligonucleotide
  modified_base 1: mod_base = OTHER; note = 2'-O-methyladenosine-3'- phosphorothioate
  modified_base 2: mod_base = OTHER; note = 2'-O-methylguanosine-3'- phosphorothioate
  modified_base 3: mod_base = OTHER; note = 2'-O-methyladenosine-3'- phosphorothioate
  modified_base 4: mod_base = OTHER; note = 2'-O-methylguanosine-3'- phosphorothioate
  modified_base 5: mod_base = OTHER; note = 2'-O-methylguanosine-3'- phosphorothioate
  modified_base 6: mod_base = OTHER; note = 5'-methyl-deoxycytidine-3'-phosphorothioate
  modified_base 7: mod_base = OTHER; note = 5'-methyl-deoxycytidine-3'-phosphorothioate
  modified_base 8: mod_base = OTHER; note = 2'-deoxyadenosine-3'-phosphorothioate
  modified_base 9: mod_base = OTHER; note = 5'-methyl-deoxycytidine-3'-phosphorothioate
  modified_base 10: mod_base = OTHER; note = 2'-deoxyadenosine-3'-phosphorothioate
  modified_base 11: mod_base = OTHER; note = 2'-deoxyguanosine-3'-phosphorothioate
  modified_base 12: mod_base = OTHER; note = 2'-deoxyguanosine-3'-phosphorothioate
  modified_base 13: mod_base = OTHER; note = 2'-deoxyguanosine-3'-phosphorothioate
  modified_base 14: mod_base = OTHER; note = 2'-deoxyadenosine-3'-phosphorothioate
  modified_base 15: mod_base = OTHER; note = 5'-methyl-deoxycytidine-3'-phosphorothioate
  modified_base 16: mod_base = OTHER; note = 2'-O-methyladenosine-3'- phosphorothioate
  modified_base 17: mod_base = OTHER; note = 2'-O-methyluridine-3'-phosphorothioate
  modified_base 18: mod_base = OTHER; note = 2'-O-methylguanosine-3'- phosphorothioate
  modified_base 19: mod_base = OTHER; note = 2'-O-methylcytidine-3'- phosphorothioate
  modified_base 20: mod_base = OTHER; note = 2'-O-methyladenosine-3'-phosphate
  misc_feature 1..5: note = RNA
  misc_feature 6..15: note = DNA
  misc_feature 16..20: note = RNA
agaggccacagggacatgca

SEQ ID NO: 17 - DNA, 20 bp, synthetic construct
  source 1..20: mol_type = other DNA; note = Description of Artificial Sequence: Synthetic oligonucleotide; note = Description of Combined DNA/RNA Molecule: Synthetic oligonucleotide
  modified_base 1: mod_base = OTHER; note = 2'-O-methyluridine-3'-phosphorothioate
  modified_base 2: mod_base = OTHER; note = 2'-O-methylguanosine-3'- phosphorothioate
  modified_base 3: mod_base = OTHER; note = 2'-O-methyluridine-3'-phosphorothioate
  modified_base 4: mod_base = OTHER; note = 2'-O-methyladenosine-3'- phosphorothioate
  modified_base 5: mod_base = OTHER; note = 2'-O-methylcytidine-3'- phosphorothioate
  modified_base 6: mod_base = OTHER; note = 5'-methyl-deoxycytidine-3'-phosphorothioate
  modified_base 7: mod_base = OTHER; note = 5'-methyl-deoxycytidine-3'-phosphorothioate
  modified_base 8: mod_base = OTHER; note = 5'-methyl-deoxycytidine-3'-phosphorothioate
  modified_base 9: mod_base = OTHER; note = 5'-methyl-deoxycytidine-3'-phosphorothioate
  modified_base 10: mod_base = OTHER; note = 2'-deoxyadenosine-3'-phosphorothioate
  modified_base 11: mod_base = OTHER; note = 2'-deoxyadenosine-3'-phosphorothioate
  modified_base 12: mod_base = OTHER; note = 2'-deoxyguanosine-3'-phosphorothioate
  modified_base 13: mod_base = OTHER; note = 2'-deoxyadenosine-3'-phosphorothioate
  modified_base 14: mod_base = OTHER; note = 2'-deoxyguanosine-3'-phosphorothioate
  modified_base 15: mod_base = OTHER; note = 2'-deoxyguanosine-3'-phosphorothioate
  modified_base 16: mod_base = OTHER; note = 2'-O-methylcytidine-3'- phosphorothioate
  modified_base 17: mod_base = OTHER; note = 2'-O-methylcytidine-3'- phosphorothioate
  modified_base 18: mod_base = OTHER; note = 2'-O-methyladenosine-3'- phosphorothioate
  modified_base 19: mod_base = OTHER; note = 2'-O-methylcytidine-3'- phosphorothioate
  modified_base 20: mod_base = OTHER; note = 2'-O-methyladenosine-3'-phosphate
  misc_feature 1..5: note = RNA
  misc_feature 6..15: note = DNA
  misc_feature 16..20: note = RNA
tgtacccccaagaggccaca

SEQ ID NO: 18 - DNA, 20 bp, synthetic construct
  source 1..20: mol_type = other DNA; note = Description of Artificial Sequence: Synthetic oligonucleotide; note = Description of Combined DNA/RNA Molecule: Synthetic oligonucleotide
  modified_base 1: mod_base = OTHER; note = 2'-O-methylcytidine-3'- phosphorothioate
  modified_base 2: mod_base = OTHER; note = 2'-O-methylcytidine-3'- phosphorothioate
  modified_base 3: mod_base = OTHER; note = 2'-O-methylcytidine-3'- phosphorothioate
  modified_base 4: mod_base = OTHER; note = 2'-O-methylcytidine-3'- phosphorothioate
  modified_base 5: mod_base = OTHER; note = 2'-O-methylguanosine-3'- phosphorothioate
  modified_base 6: mod_base = OTHER; note = 2'-deoxyguanosine-3'-phosphorothioate
  modified_base 7: mod_base = OTHER; note = 2'-deoxyguanosine-3'-phosphorothioate
  modified_base 8: mod_base = OTHER; note = 2'-deoxyadenosine-3'-phosphorothioate
  modified_base 9: mod_base = OTHER; note = 2'-deoxyguanosine-3'-phosphorothioate
  modified_base 10: mod_base = OTHER; note = 2'-deoxyadenosine-3'-phosphorothioate
  modified_base 11: mod_base = OTHER; note = 2'-deoxythymidine-3'-phosphorothioate
  modified_base 12: mod_base = OTHER; note = 2'-deoxyguanosine-3'-phosphorothioate
  modified_base 13: mod_base = OTHER; note = 2'-deoxythymidine-3'-phosphorothioate
  modified_base 14: mod_base = OTHER; note = 2'-deoxyadenosine-3'-phosphorothioate
  modified_base 15: mod_base = OTHER; note = 5'-methyl-deoxycytidine-3'-phosphorothioate
  modified_base 16: mod_base = OTHER; note = 2'-O-methylcytidine-3'- phosphorothioate
  modified_base 17: mod_base = OTHER; note = 2'-O-methylcytidine-3'- phosphorothioate
  modified_base 18: mod_base = OTHER; note = 2'-O-methylcytidine-3'- phosphorothioate
  modified_base 19: mod_base = OTHER; note = 2'-O-methylcytidine-3'- phosphorothioate
  modified_base 20: mod_base = OTHER; note = 2'-O-methyladenosine-3'-phosphate
  misc_feature 1..5: note = RNA
  misc_feature 6..15: note = DNA
  misc_feature 16..20: note = RNA
ccccgggagatgtaccccca

SEQ ID NO: 19 - DNA, 20 bp, synthetic construct
  source 1..20: mol_type = other DNA; note = Description of Artificial Sequence: Synthetic oligonucleotide; note = Description of Combined DNA/RNA Molecule: Synthetic oligonucleotide
  modified_base 1: mod_base = OTHER; note = 2'-O-methylcytidine-3'- phosphorothioate
  modified_base 2: mod_base = OTHER; note = 2'-O-methyluridine-3'-phosphorothioate
  modified_base 3: mod_base = OTHER; note = 2'-O-methyluridine-3'-phosphorothioate
  modified_base 4: mod_base = OTHER; note = 2'-O-methylcytidine-3'- phosphorothioate
  modified_base 5: mod_base = OTHER; note = 2'-O-methyluridine-3'-phosphorothioate
  modified_base 6: mod_base = OTHER; note = 2'-deoxyguanosine-3'-phosphorothioate
  modified_base 7: mod_base = OTHER; note = 2'-deoxyadenosine-3'-phosphorothioate
  modified_base 8: mod_base = OTHER; note = 5'-methyl-deoxycytidine-3'-phosphorothioate
  modified_base 9: mod_base = OTHER; note = 5'-methyl-deoxycytidine-3'-phosphorothioate
  modified_base 10: mod_base = OTHER; note = 5'-methyl-deoxycytidine-3'-phosphorothioate
  modified_base 11: mod_base = OTHER; note = 2'-deoxyadenosine-3'-phosphorothioate
  modified_base 12: mod_base = OTHER; note = 2'-deoxyguanosine-3'-phosphorothioate
  modified_base 13: mod_base = OTHER; note = 5'-methyl-deoxycytidine-3'-phosphorothioate
  modified_base 14: mod_base = OTHER; note = 5'-methyl-deoxycytidine-3'-phosphorothioate
  modified_base 15: mod_base = OTHER; note = 5'-methyl-deoxycytidine-3'-phosphorothioate
  modified_base 16: mod_base = OTHER; note = 2'-O-methylcytidine-3'- phosphorothioate
  modified_base 17: mod_base = OTHER; note = 2'-O-methylguanosine-3'- phosphorothioate
  modified_base 18: mod_base = OTHER; note = 2'-O-methylguanosine-3'- phosphorothioate
  modified_base 19: mod_base = OTHER; note = 2'-O-methylguanosine-3'- phosphorothioate
  modified_base 20: mod_base = OTHER; note = 2'-O-methyladenosine-3'-phosphate
  misc_feature 1..5: note = RNA
  misc_feature 6..15: note = DNA
  misc_feature 16..20: note = RNA
cttctgacccagccccggga

SEQ ID NO: 20 - DNA, 20 bp, synthetic construct
  source 1..20: mol_type = other DNA; note = Description of Artificial Sequence: Synthetic oligonucleotide; note = Description of Combined DNA/RNA Molecule: Synthetic oligonucleotide
  modified_base 1: mod_base = OTHER; note = 2'-O-methyladenosine-3'- phosphorothioate
  modified_base 2: mod_base = OTHER; note = 2'-O-methylcytidine-3'- phosphorothioate
  modified_base 3: mod_base = OTHER; note = 2'-O-methylcytidine-3'- phosphorothioate
  modified_base 4: mod_base = OTHER; note = 2'-O-methyladenosine-3'- phosphorothioate
  modified_base 5: mod_base = OTHER; note = 2'-O-methylcytidine-3'- phosphorothioate
  modified_base 6: mod_base = OTHER; note = 5'-methyl-deoxycytidine-3'-phosphorothioate
  modified_base 7: mod_base = OTHER; note = 5'-methyl-deoxycytidine-3'-phosphorothioate
  modified_base 8: mod_base = OTHER; note = 2'-deoxyadenosine-3'-phosphorothioate
  modified_base 9: mod_base = OTHER; note = 2'-deoxyguanosine-3'-phosphorothioate
  modified_base 10: mod_base = OTHER; note = 2'-deoxyguanosine-3'-phosphorothioate
  modified_base 11: mod_base = OTHER; note = 5'-methyl-deoxycytidine-3'-phosphorothioate
  modified_base 12: mod_base = OTHER; note = 5'-methyl-deoxycytidine-3'-phosphorothioate
  modified_base 13: mod_base = OTHER; note = 2'-deoxythymidine-3'-phosphorothioate
  modified_base 14: mod_base = OTHER; note = 2'-deoxythymidine-3'-phosphorothioate
  modified_base 15: mod_base = OTHER; note = 5'-methyl-deoxycytidine-3'-phosphorothioate
  modified_base 16: mod_base = OTHER; note = 2'-O-methyluridine-3'-phosphorothioate
  modified_base 17: mod_base = OTHER; note = 2'-O-methylguanosine-3'- phosphorothioate
  modified_base 18: mod_base = OTHER; note = 2'-O-methyladenosine-3'- phosphorothioate
  modified_base 19: mod_base = OTHER; note = 2'-O-methylcytidine-3'- phosphorothioate
  modified_base 20: mod_base = OTHER; note = 2'-O-methylcytidine-3'-phosphate
  misc_feature 1..5: note = RNA
  misc_feature 6..15: note = DNA
  misc_feature 16..20: note = RNA
accacccaggccttctgacc

SEQ ID NO: 21 - DNA, 20 bp, synthetic construct
  source 1..20: mol_type = other DNA; note = Description of Artificial Sequence: Synthetic oligonucleotide; note = Description of Combined DNA/RNA Molecule: Synthetic oligonucleotide
  modified_base 1: mod_base = OTHER; note = 2'-O-methyladenosine-3'- phosphorothioate
  modified_base 2: mod_base = OTHER; note = 2'-O-methylguanosine-3'- phosphorothioate
  modified_base 3: mod_base = OTHER; note = 2'-O-methylcytidine-3'- phosphorothioate
  modified_base 4: mod_base = OTHER; note = 2'-O-methylcytidine-3'- phosphorothioate
  modified_base 5: mod_base = OTHER; note = 2'-O-methyluridine-3'-phosphorothioate
  modified_base 6: mod_base = OTHER; note = 2'-deoxyguanosine-3'-phosphorothioate
  modified_base 7: mod_base = OTHER; note = 2'-deoxyadenosine-3'-phosphorothioate
  modified_base 8: mod_base = OTHER; note = 2'-deoxyguanosine-3'-phosphorothioate
  modified_base 9: mod_base = OTHER; note = 2'-deoxyguanosine-3'-phosphorothioate
  modified_base 10: mod_base = OTHER; note = 5'-methyl-deoxycytidine-3'-phosphorothioate
  modified_base 11: mod_base = OTHER; note = 5'-methyl-deoxycytidine-3'-phosphorothioate
  modified_base 12: mod_base = OTHER; note = 2'-deoxyadenosine-3'-phosphorothioate
  modified_base 13: mod_base = OTHER; note = 2'-deoxyadenosine-3'-phosphorothioate
  modified_base 14: mod_base = OTHER; note = 5'-methyl-deoxycytidine-3'-phosphorothioate
  modified_base 15: mod_base = OTHER; note = 5'-methyl-deoxycytidine-3'-phosphorothioate
  modified_base 16: mod_base = OTHER; note = 2'-O-methyladenosine-3'- phosphorothioate
  modified_base 17: mod_base = OTHER; note = 2'-O-methylcytidine-3'- phosphorothioate
  modified_base 18: mod_base = OTHER; note = 2'-O-methylcytidine-3'- phosphorothioate
  modified_base 19: mod_base = OTHER; note = 2'-O-methylcytidine-3'- phosphorothioate
  modified_base 20: mod_base = OTHER; note = 2'-O-methyladenosine-3'-phosphate
  misc_feature 1..5: note = RNA
  misc_feature 6..15: note = DNA
  misc_feature 16..20: note = RNA
agcctgaggccaaccaccca

SEQ ID NO: 22 - DNA, 20 bp, synthetic construct
  source 1..20: mol_type = other DNA; note = Description of Artificial Sequence: Synthetic oligonucleotide; note = Description of Combined DNA/RNA Molecule: Synthetic oligonucleotide
  modified_base 1: mod_base = OTHER; note = 2'-O-methyladenosine-3'- phosphorothioate
  modified_base 2: mod_base = OTHER; note = 2'-O-methylguanosine-3'- phosphorothioate
  modified_base 3: mod_base = OTHER; note = 2'-O-methylguanosine-3'- phosphorothioate
  modified_base 4: mod_base = OTHER; note = 2'-O-methyluridine-3'-phosphorothioate
  modified_base 5: mod_base = OTHER; note = 2'-O-methylguanosine-3'- phosphorothioate
  modified_base 6: mod_base = OTHER; note = 2'-deoxythymidine-3'-phosphorothioate
  modified_base 7: mod_base = OTHER; note = 2'-deoxyguanosine-3'-phosphorothioate
  modified_base 8: mod_base = OTHER; note = 2'-deoxythymidine-3'-phosphorothioate
  modified_base 9: mod_base = OTHER; note = 2'-deoxyguanosine-3'-phosphorothioate
  modified_base 10: mod_base = OTHER; note = 2'-deoxyadenosine-3'-phosphorothioate
  modified_base 11: mod_base = OTHER; note = 5'-methyl-deoxycytidine-3'-phosphorothioate
  modified_base 12: mod_base = OTHER; note = 2'-deoxyadenosine-3'-phosphorothioate
  modified_base 13: mod_base = OTHER; note = 2'-deoxyguanosine-3'-phosphorothioate
  modified_base 14: mod_base = OTHER; note = 5'-methyl-deoxycytidine-3'-phosphorothioate
  modified_base 15: mod_base = OTHER; note = 5'-methyl-deoxycytidine-3'-phosphorothioate
  modified_base 16: mod_base = OTHER; note = 2'-O-methyluridine-3'-phosphorothioate
  modified_base 17: mod_base = OTHER; note = 2'-O-methylguanosine-3'- phosphorothioate
  modified_base 18: mod_base = OTHER; note = 2'-O-methyladenosine-3'- phosphorothioate
  modified_base 19: mod_base = OTHER; note = 2'-O-methylguanosine-3'- phosphorothioate
  modified_base 20: mod_base = OTHER; note = 2'-O-methylguanosine-3'-phosphate
  misc_feature 1..5: note = RNA
  misc_feature 6..15: note = DNA
  misc_feature 16..20: note = RNA
aggtgtgtgacagcctgagg

SEQ ID NO: 23 - DNA, 20 bp, synthetic construct
  source 1..20: mol_type = other DNA; note = Description of Artificial Sequence: Synthetic oligonucleotide; note = Description of Combined DNA/RNA Molecule: Synthetic oligonucleotide
  modified_base 1: mod_base = OTHER; note = 2'-O-methyladenosine-3'- phosphorothioate
  modified_base 2: mod_base = OTHER; note = 2'-O-methylguanosine-3'- phosphorothioate
  modified_base 3: mod_base = OTHER; note = 2'-O-methylcytidine-3'- phosphorothioate
  modified_base 4: mod_base = OTHER; note = 2'-O-methyladenosine-3'- phosphorothioate
  modified_base 5: mod_base = OTHER; note = 2'-O-methyluridine-3'-phosphorothioate
  modified_base 6: mod_base = OTHER; note = 5'-methyl-deoxycytidine-3'-phosphorothioate
  modified_base 7: mod_base = OTHER; note = 2'-deoxythymidine-3'-phosphorothioate
  modified_base 8: mod_base = OTHER; note = 5'-methyl-deoxycytidine-3'-phosphorothioate
  modified_base 9: mod_base = OTHER; note = 5'-methyl-deoxycytidine-3'-phosphorothioate
  modified_base 10: mod_base = OTHER; note = 5'-methyl-deoxycytidine-3'-phosphorothioate
  modified_base 11: mod_base = OTHER; note = 2'-deoxythymidine-3'-phosphorothioate
  modified_base 12: mod_base = OTHER; note = 2'-deoxyadenosine-3'-phosphorothioate
  modified_base 13: mod_base = OTHER; note = 2'-deoxyguanosine-3'-phosphorothioate
  modified_base 14: mod_base = OTHER; note = 2'-deoxyguanosine-3'-phosphorothioate
  modified_base 15: mod_base = OTHER; note = 2'-deoxythymidine-3'-phosphorothioate
  modified_base 16: mod_base = OTHER; note = 2'-O-methylguanosine-3'- phosphorothioate
  modified_base 17: mod_base = OTHER; note = 2'-O-methyluridine-3'-phosphorothioate
  modified_base 18: mod_base = OTHER; note = 2'-O-methylguanosine-3'- phosphorothioate
  modified_base 19: mod_base = OTHER; note = 2'-O-methyluridine-3'-phosphorothioate
  modified_base 20: mod_base = OTHER; note = 2'-O-methylguanosine-3'-phosphate
  misc_feature 1..5: note = RNA
  misc_feature 6..15: note = DNA
  misc_feature 16..20: note = RNA
agcatctccctaggtgtgtg

SEQ ID NO: 24 - DNA, 20 bp, synthetic construct
  source 1..20: mol_type = other DNA; note = Description of Artificial Sequence: Synthetic oligonucleotide; note = Description of Combined DNA/RNA Molecule: Synthetic oligonucleotide
  modified_base 1: mod_base = OTHER; note = 2'-O-methyladenosine-3'- phosphorothioate
  modified_base 2: mod_base = OTHER; note = 2'-O-methylguanosine-3'- phosphorothioate
  modified_base 3: mod_base = OTHER; note = 2'-O-methyladenosine-3'- phosphorothioate
  modified_base 4: mod_base = OTHER; note = 2'-O-methyladenosine-3'- phosphorothioate
  modified_base 5: mod_base = OTHER; note = 2'-O-methyladenosine-3'- phosphorothioate
  modified_base 6: mod_base = OTHER; note = 5'-methyl-deoxycytidine-3'-phosphorothioate
  modified_base 7: mod_base = OTHER; note = 2'-deoxyguanosine-3'-phosphorothioate
  modified_base 8: mod_base = OTHER; note = 2'-deoxyguanosine-3'-phosphorothioate
  modified_base 9: mod_base = OTHER; note = 2'-deoxyguanosine-3'-phosphorothioate
  modified_base 10: mod_base = OTHER; note = 2'-deoxyadenosine-3'-phosphorothioate
  modified_base 11: mod_base = OTHER; note = 2'-deoxyguanosine-3'-phosphorothioate
  modified_base 12: mod_base = OTHER; note = 5'-methyl-deoxycytidine-3'-phosphorothioate
  modified_base 13: mod_base = OTHER; note = 2'-deoxyadenosine-3'-phosphorothioate
  modified_base 14: mod_base = OTHER; note = 2'-deoxythymidine-3'-phosphorothioate
  modified_base 15: mod_base = OTHER; note = 5'-methyl-deoxycytidine-3'-phosphorothioate
  modified_base 16: mod_base = OTHER; note = 2'-O-methyluridine-3'-phosphorothioate
  modified_base 17: mod_base = OTHER; note = 2'-O-methylcytidine-3'- phosphorothioate
  modified_base 18: mod_base = OTHER; note = 2'-O-methylcytidine-3'- phosphorothioate
  modified_base 19: mod_base = OTHER; note = 2'-O-methylcytidine-3'- phosphorothioate
  modified_base 20: mod_base = OTHER; note = 2'-O-methyluridine-3'-phosphate
  misc_feature 1..5: note = RNA
  misc_feature 6..15: note = DNA
  misc_feature 16..20: note = RNA
agaaacgggagcatctccct

SEQ ID NO: 25 - DNA, 20 bp, synthetic construct
  source 1..20: mol_type = other DNA; note = Description of Artificial Sequence: Synthetic oligonucleotide; note = Description of Combined DNA/RNA Molecule: Synthetic oligonucleotide
  modified_base 1: mod_base = OTHER; note = 2'-O-methylguanosine-3'- phosphorothioate
  modified_base 2: mod_base = OTHER; note = 2'-O-methylcytidine-3'- phosphorothioate
  modified_base 3: mod_base = OTHER; note = 2'-O-methylcytidine-3'- phosphorothioate
  modified_base 4: mod_base = OTHER; note = 2'-O-methyladenosine-3'- phosphorothioate
  modified_base 5: mod_base = OTHER; note = 2'-O-methyladenosine-3'- phosphorothioate
  modified_base 6: mod_base = OTHER; note = 2'-deoxyguanosine-3'-phosphorothioate
  modified_base 7: mod_base = OTHER; note = 2'-deoxyguanosine-3'-phosphorothioate
  modified_base 8: mod_base = OTHER; note = 2'-deoxythymidine-3'-phosphorothioate
  modified_base 9: mod_base = OTHER; note = 2'-deoxythymidine-3'-phosphorothioate
  modified_base 10: mod_base = OTHER; note = 5'-methyl-deoxycytidine-3'-phosphorothioate
  modified_base 11: mod_base = OTHER; note = 5'-methyl-deoxycytidine-3'-phosphorothioate
  modified_base 12: mod_base = OTHER; note = 5'-methyl-deoxycytidine-3'-phosphorothioate
  modified_base 13: mod_base = OTHER; note = 2'-deoxyadenosine-3'-phosphorothioate
  modified_base 14: mod_base = OTHER; note = 2'-deoxyguanosine-3'-phosphorothioate
  modified_base 15: mod_base = OTHER; note = 2'-deoxyadenosine-3'-phosphorothioate
  modified_base 16: mod_base = OTHER; note = 2'-O-methyladenosine-3'- phosphorothioate
  modified_base 17: mod_base = OTHER; note = 2'-O-methyladenosine-3'- phosphorothioate
  modified_base 18: mod_base = OTHER; note = 2'-O-methylcytidine-3'- phosphorothioate
  modified_base 19: mod_base = OTHER; note = 2'-O-methylguanosine-3'- phosphorothioate
  modified_base 20: mod_base = OTHER; note = 2'-O-methylguanosine-3'-phosphate
  misc_feature 1..5: note = RNA
  misc_feature 6..15: note = DNA
  misc_feature 16..20: note = RNA
gccaaggttcccagaaacgg

SEQ ID NO: 26 - DNA, 20 bp, synthetic construct
  source 1..20: mol_type = other DNA; note = Description of Artificial Sequence: Synthetic oligonucleotide; note = Description of Combined DNA/RNA Molecule: Synthetic oligonucleotide
  modified_base 1: mod_base = OTHER; note = 2'-O-methylcytidine-3'- phosphorothioate
  modified_base 2: mod_base = OTHER; note = 2'-O-methyladenosine-3'- phosphorothioate
  modified_base 3: mod_base = OTHER; note = 2'-O-methylguanosine-3'- phosphorothioate
  modified_base 4: mod_base = OTHER; note = 2'-O-methylguanosine-3'- phosphorothioate
  modified_base 5: mod_base = OTHER; note = 2'-O-methyladenosine-3'- phosphorothioate
  modified_base 6: mod_base = OTHER; note = 2'-deoxyguanosine-3'-phosphorothioate
  modified_base 7: mod_base = OTHER; note = 2'-deoxythymidine-3'-phosphorothioate
  modified_base 8: mod_base = OTHER; note = 5'-methyl-deoxycytidine-3'-phosphorothioate
  modified_base 9: mod_base = OTHER; note = 2'-deoxyguanosine-3'-phosphorothioate
  modified_base 10: mod_base = OTHER; note = 2'-deoxyguanosine-3'-phosphorothioate
  modified_base 11: mod_base = OTHER; note = 2'-deoxyguanosine-3'-phosphorothioate
  modified_base 12: mod_base = OTHER; note = 2'-deoxyguanosine-3'-phosphorothioate
  modified_base 13: mod_base = OTHER; note = 5'-methyl-deoxycytidine-3'-phosphorothioate
  modified_base 14: mod_base = OTHER; note = 5'-methyl-deoxycytidine-3'-phosphorothioate
  modified_base 15: mod_base = OTHER; note = 2'-deoxyadenosine-3'-phosphorothioate
  modified_base 16: mod_base = OTHER; note = 2'-O-methyladenosine-3'- phosphorothioate
  modified_base 17: mod_base = OTHER; note = 2'-O-methylguanosine-3'- phosphorothioate
  modified_base 18: mod_base = OTHER; note = 2'-O-methylguanosine-3'- phosphorothioate
  modified_base 19: mod_base = OTHER; note = 2'-O-methyluridine-3'-phosphorothioate
  modified_base 20: mod_base = OTHER; note = 2'-O-methyluridine-3'-phosphate
  misc_feature 1..5: note = RNA
  misc_feature 6..15: note = DNA
  misc_feature 16..20: note = RNA
caggagtcggggccaaggtt

SEQ ID NO: 27 - DNA, 20 bp, synthetic construct
  source 1..20: mol_type = other DNA; note = Description of Artificial Sequence: Synthetic oligonucleotide; note = Description of Combined DNA/RNA Molecule: Synthetic oligonucleotide
  modified_base 1: mod_base = OTHER; note = 2'-O-methyladenosine-3'- phosphorothioate
  modified_base 2: mod_base = OTHER; note = 2'-O-methylcytidine-3'- phosphorothioate
  modified_base 3: mod_base = OTHER; note = 2'-O-methylcytidine-3'- phosphorothioate
  modified_base 4: mod_base = OTHER; note = 2'-O-methylguanosine-3'- phosphorothioate
  modified_base 5: mod_base = OTHER; note = 2'-O-methyladenosine-3'- phosphorothioate
  modified_base 6: mod_base = OTHER; note = 2'-deoxyadenosine-3'-phosphorothioate
  modified_base 7: mod_base = OTHER; note = 2'-deoxyguanosine-3'-phosphorothioate
  modified_base 8: mod_base = OTHER; note = 2'-deoxythymidine-3'-phosphorothioate
  modified_base 9: mod_base = OTHER; note = 2'-deoxythymidine-3'-phosphorothioate
  modified_base 10: mod_base = OTHER; note = 2'-deoxythymidine-3'-phosphorothioate
  modified_base 11: mod_base = OTHER; note = 2'-deoxyguanosine-3'-phosphorothioate
  modified_base 12: mod_base = OTHER; note = 5'-methyl-deoxycytidine-3'-phosphorothioate
  modified_base 13: mod_base = OTHER; note = 2'-deoxyadenosine-3'-phosphorothioate
  modified_base 14: mod_base = OTHER; note = 2'-deoxyguanosine-3'-phosphorothioate
  modified_base 15: mod_base = OTHER; note = 2'-deoxyguanosine-3'-phosphorothioate
  modified_base 16: mod_base = OTHER; note = 2'-O-methyladenosine-3'- phosphorothioate
  modified_base 17: mod_base = OTHER; note = 2'-O-methylguanosine-3'- phosphorothioate
  modified_base 18: mod_base = OTHER; note = 2'-O-methyluridine-3'-phosphorothioate
  modified_base 19: mod_base = OTHER; note = 2'-O-methylcytidine-3'- phosphorothioate
  modified_base 20: mod_base = OTHER; note = 2'-O-methylguanosine-3'-phosphate
  misc_feature 1..5: note = RNA
  misc_feature 6..15: note = DNA
  misc_feature 16..20: note = RNA
accgaagtttgcaggagtcg

SEQ ID NO: 28 - DNA, 20 bp, synthetic construct
  source 1..20: mol_type = other DNA; note = Description of Artificial Sequence: Synthetic oligonucleotide; note = Description of Combined DNA/RNA Molecule: Synthetic oligonucleotide
  modified_base 1: mod_base = OTHER; note = 2'-O-methylguanosine-3'- phosphorothioate
  modified_base 2: mod_base = OTHER; note = 2'-O-methyluridine-3'-phosphorothioate
  modified_base 3: mod_base = OTHER; note = 2'-O-methyluridine-3'-phosphorothioate
  modified_base 4: mod_base = OTHER; note = 2'-O-methyladenosine-3'- phosphorothioate
  modified_base 5: mod_base = OTHER; note = 2'-O-methylcytidine-3'- phosphorothioate
  modified_base 6: mod_base = OTHER; note = 2'-deoxyadenosine-3'-phosphorothioate
  modified_base 7: mod_base = OTHER; note = 5'-methyl-deoxycytidine-3'-phosphorothioate
  modified_base 8: mod_base = OTHER; note = 2'-deoxyadenosine-3'-phosphorothioate
  modified_base 9: mod_base = OTHER; note = 2'-deoxythymidine-3'-phosphorothioate
  modified_base 10: mod_base = OTHER; note = 2'-deoxythymidine-3'-phosphorothioate
  modified_base 11: mod_base = OTHER; note = 2'-deoxythymidine-3'-phosphorothioate
  modified_base 12: mod_base = OTHER; note = 2'-deoxyadenosine-3'-phosphorothioate
  modified_base 13: mod_base = OTHER; note = 5'-methyl-deoxycytidine-3'-phosphorothioate
  modified_base 14: mod_base = OTHER; note = 5'-methyl-deoxycytidine-3'-phosphorothioate
  modified_base 15: mod_base = OTHER; note = 2'-deoxyguanosine-3'-phosphorothioate
  modified_base 16: mod_base = OTHER; note = 2'-O-methyladenosine-3'- phosphorothioate
  modified_base 17: mod_base = OTHER; note = 2'-O-methyladenosine-3'- phosphorothioate
  modified_base 18: mod_base = OTHER; note = 2'-O-methylguanosine-3'- phosphorothioate
  modified_base 19: mod_base = OTHER; note = 2'-O-methyluridine-3'-phosphorothioate
  modified_base 20: mod_base = OTHER; note = 2'-O-methyluridine-3'-phosphate
  misc_feature 1..5: note = RNA
  misc_feature 6..15: note = DNA
  misc_feature 16..20: note = RNA
gttacacatttaccgaagtt

SEQ ID NO: 29 - DNA, 20 bp, synthetic construct
  source 1..20: mol_type = other DNA; note = Description of Artificial Sequence: Synthetic oligonucleotide; note = Description of Combined DNA/RNA Molecule: Synthetic oligonucleotide
  modified_base 1: mod_base = OTHER; note = 2'-O-methylguanosine-3'- phosphorothioate
  modified_base 2: mod_base = OTHER; note = 2'-O-methyluridine-3'-phosphorothioate
  modified_base 3: mod_base = OTHER; note = 2'-O-methylguanosine-3'- phosphorothioate
  modified_base 4: mod_base = OTHER; note = 2'-O-methylcytidine-3'- phosphorothioate
  modified_base 5: mod_base = OTHER; note = 2'-O-methyladenosine-3'- phosphorothioate
  modified_base 6: mod_base = OTHER; note = 2'-deoxyguanosine-3'-phosphorothioate
  modified_base 7: mod_base = OTHER; note = 2'-deoxyguanosine-3'-phosphorothioate
  modified_base 8: mod_base = OTHER; note = 2'-deoxyguanosine-3'-phosphorothioate
  modified_base 9: mod_base = OTHER; note = 2'-deoxythymidine-3'-phosphorothioate
  modified_base 10: mod_base = OTHER; note = 5'-methyl-deoxycytidine-3'-phosphorothioate
  modified_base 11: mod_base = OTHER; note = 2'-deoxyguanosine-3'-phosphorothioate
  modified_base 12: mod_base = OTHER; note = 2'-deoxyadenosine-3'-phosphorothioate
  modified_base 13: mod_base = OTHER; note = 2'-deoxyguanosine-3'-phosphorothioate
  modified_base 14: mod_base = OTHER; note = 2'-deoxythymidine-3'-phosphorothioate
  modified_base 15: mod_base = OTHER; note = 2'-deoxythymidine-3'-phosphorothioate
  modified_base 16: mod_base = OTHER; note = 2'-O-methyladenosine-3'- phosphorothioate
  modified_base 17: mod_base = OTHER; note = 2'-O-methylcytidine-3'- phosphorothioate
  modified_base 18: mod_base = OTHER; note = 2'-O-methyladenosine-3'- phosphorothioate
  modified_base 19: mod_base = OTHER; note = 2'-O-methylcytidine-3'- phosphorothioate
  modified_base 20: mod_base = OTHER; note = 2'-O-methyladenosine-3'-phosphate
  misc_feature 1..5: note = RNA
  misc_feature 6..15: note = DNA
  misc_feature 16..20: note = RNA
gtgcagggtcgagttacaca

SEQ ID NO: 30 - DNA, 20 bp, synthetic construct
  source 1..20: mol_type = other DNA; note = Description of Artificial Sequence: Synthetic oligonucleotide; note = Description of Combined DNA/RNA Molecule: Synthetic oligonucleotide
  modified_base 1: mod_base = OTHER; note = 2'-O-methyladenosine-3'- phosphorothioate
  modified_base 2: mod_base = OTHER; note = 2'-O-methylguanosine-3'- phosphorothioate
  modified_base 3: mod_base = OTHER; note = 2'-O-methyladenosine-3'- phosphorothioate
  modified_base 4: mod_base = OTHER; note = 2'-O-methylguanosine-3'- phosphorothioate
  modified_base 5: mod_base = OTHER; note = 2'-O-methyluridine-3'-phosphorothioate
  modified_base 6: mod_base = OTHER; note = 2'-deoxyguanosine-3'-phosphorothioate
  modified_base 7: mod_base = OTHER; note = 2'-deoxyadenosine-3'-phosphorothioate
  modified_base 8: mod_base = OTHER; note = 2'-deoxyguanosine-3'-phosphorothioate
  modified_base 9: mod_base = OTHER; note = 5'-methyl-deoxycytidine-3'-phosphorothioate
  modified_base 10: mod_base = OTHER; note = 5'-methyl-deoxycytidine-3'-phosphorothioate
  modified_base 11: mod_base = OTHER; note = 2'-deoxyguanosine-3'-phosphorothioate
  modified_base 12: mod_base = OTHER; note = 2'-deoxyguanosine-3'-phosphorothioate
  modified_base 13: mod_base = OTHER; note = 2'-deoxythymidine-3'-phosphorothioate
  modified_base 14: mod_base = OTHER; note = 2'-deoxyguanosine-3'-phosphorothioate
  modified_base 15: mod_base = OTHER; note = 5'-methyl-deoxycytidine-3'-phosphorothioate
  modified_base 16: mod_base = OTHER; note = 2'-O-methyladenosine-3'- phosphorothioate
  modified_base 17: mod_base = OTHER; note = 2'-O-methylguanosine-3'- phosphorothioate
  modified_base 18: mod_base = OTHER; note = 2'-O-methylguanosine-3'- phosphorothioate
  modified_base 19: mod_base = OTHER; note = 2'-O-methylguanosine-3'- phosphorothioate
  modified_base 20: mod_base = OTHER; note = 2'-O-methyluridine-3'-phosphate
  misc_feature 1..5: note = RNA
  misc_feature 6..15: note = DNA
  misc_feature 16..20: note = RNA
agagtgagccggtgcagggt

SEQ ID NO: 31 - DNA, 20 bp, synthetic construct
  source 1..20: mol_type = other DNA; note = Description of Artificial Sequence: Synthetic oligonucleotide; note = Description of Combined DNA/RNA Molecule: Synthetic oligonucleotide
  modified_base 1: mod_base = OTHER; note = 2'-O-methylcytidine-3'- phosphorothioate
  modified_base 2: mod_base = OTHER; note = 2'-O-methyladenosine-3'- phosphorothioate
  modified_base 3: mod_base = OTHER; note = 2'-O-methylcytidine-3'- phosphorothioate
  modified_base 4: mod_base = OTHER; note = 2'-O-methyluridine-3'-phosphorothioate
  modified_base 5: mod_base = OTHER; note = 2'-O-methylguanosine-3'- phosphorothioate
  modified_base 6: mod_base = OTHER; note = 5'-methyl-deoxycytidine-3'-phosphorothioate
  modified_base 7: mod_base = OTHER; note = 2'-deoxythymidine-3'-phosphorothioate
  modified_base 8: mod_base = OTHER; note = 2'-deoxyguanosine-3'-phosphorothioate
  modified_base 9: mod_base = OTHER; note = 2'-deoxyadenosine-3'-phosphorothioate
  modified_base 10: mod_base = OTHER; note = 2'-deoxyadenosine-3'-phosphorothioate
  modified_base 11: mod_base = OTHER; note = 5'-methyl-deoxycytidine-3'-phosphorothioate
  modified_base 12: mod_base = OTHER; note = 2'-deoxyadenosine-3'-phosphorothioate
  modified_base 13: mod_base = OTHER; note = 2'-deoxyguanosine-3'-phosphorothioate
  modified_base 14: mod_base = OTHER; note = 2'-deoxyadenosine-3'-phosphorothioate
  modified_base 15: mod_base = OTHER; note = 2'-deoxyguanosine-3'-phosphorothioate
  modified_base 16: mod_base = OTHER; note = 2'-O-methyluridine-3'-phosphorothioate
  modified_base 17: mod_base = OTHER; note = 2'-O-methylguanosine-3'- phosphorothioate
  modified_base 18: mod_base = OTHER; note = 2'-O-methyladenosine-3'- phosphorothioate
  modified_base 19: mod_base = OTHER; note = 2'-O-methylguanosine-3'- phosphorothioate
  modified_base 20: mod_base = OTHER; note = 2'-O-methylcytidine-3'-phosphate
  misc_feature 1..5: note = RNA
  misc_feature 6..15: note = DNA
  misc_feature 16..20: note = RNA
cactgctgaacagagtgagc

SEQ ID NO: 32 - DNA, 20 bp, synthetic construct
  source 1..20: mol_type = other DNA; note = Description of Artificial Sequence: Synthetic oligonucleotide; note = Description of Combined DNA/RNA Molecule: Synthetic oligonucleotide
  modified_base 1: mod_base = OTHER; note = 2'-O-methyluridine-3'-phosphorothioate
  modified_base 2: mod_base = OTHER; note = 2'-O-methylguanosine-3'- phosphorothioate
  modified_base 3: mod_base = OTHER; note = 2'-O-methylcytidine-3'- phosphorothioate
  modified_base 4: mod_base = OTHER; note = 2'-O-methyladenosine-3'- phosphorothioate
  modified_base 5: mod_base = OTHER; note = 2'-O-methylguanosine-3'- phosphorothioate
  modified_base 6: mod_base = OTHER; note = 2'-deoxyadenosine-3'-phosphorothioate
  modified_base 7: mod_base = OTHER; note = 2'-deoxyguanosine-3'-phosphorothioate
  modified_base 8: mod_base = OTHER; note = 2'-deoxythymidine-3'-phosphorothioate
  modified_base 9: mod_base = OTHER; note = 2'-deoxythymidine-3'-phosphorothioate
  modified_base 10: mod_base = OTHER; note = 2'-deoxythymidine-3'-phosphorothioate
  modified_base 11: mod_base = OTHER; note = 5'-methyl-deoxycytidine-3'-phosphorothioate
  modified_base 12: mod_base = OTHER; note = 2'-deoxyadenosine-3'-phosphorothioate
  modified_base 13: mod_base = OTHER; note = 5'-methyl-deoxycytidine-3'-phosphorothioate
  modified_base 14: mod_base = OTHER; note = 2'-deoxythymidine-3'-phosphorothioate
  modified_base 15: mod_base = OTHER; note = 2'-deoxyguanosine-3'-phosphorothioate
  modified_base 16: mod_base = OTHER; note = 2'-O-methylcytidine-3'- phosphorothioate
  modified_base 17: mod_base = OTHER; note = 2'-O-methyluridine-3'-phosphorothioate
  modified_base 18: mod_base = OTHER; note = 2'-O-methylguanosine-3'- phosphorothioate
  modified_base 19: mod_base = OTHER; note = 2'-O-methyladenosine-3'- phosphorothioate
  modified_base 20: mod_base = OTHER; note = 2'-O-methyladenosine-3'-phosphate
  misc_feature 1..5: note = RNA
  misc_feature 6..15: note = DNA
  misc_feature 16..20: note = RNA
tgcagagtttcactgctgaa

SEQ ID NO: 33 - DNA, 20 bp, synthetic construct
  source 1..20: mol_type = other DNA; note = Description of Artificial Sequence: Synthetic oligonucleotide; note = Description of Combined DNA/RNA Molecule: Synthetic oligonucleotide
  modified_base 1: mod_base = OTHER; note = 2'-O-methyluridine-3'-phosphorothioate
  modified_base 2: mod_base = OTHER; note = 2'-O-methyladenosine-3'- phosphorothioate
  modified_base 3: mod_base = OTHER; note = 2'-O-methylguanosine-3'- phosphorothioate
  modified_base 4: mod_base = OTHER; note = 2'-O-methyluridine-3'-phosphorothioate
  modified_base 5: mod_base = OTHER; note = 2'-O-methylguanosine-3'- phosphorothioate
  modified_base 6: mod_base = OTHER; note = 2'-deoxyadenosine-3'-phosphorothioate
  modified_base 7: mod_base = OTHER; note = 2'-deoxythymidine-3'-phosphorothioate
  modified_base 8: mod_base = OTHER; note = 5'-methyl-deoxycytidine-3'-phosphorothioate
  modified_base 9: mod_base = OTHER; note = 2'-deoxyguanosine-3'-phosphorothioate
  modified_base 10: mod_base = OTHER; note = 2'-deoxyadenosine-3'-phosphorothioate
  modified_base 11: mod_base = OTHER; note = 2'-deoxythymidine-3'-phosphorothioate
  modified_base 12: mod_base = OTHER; note = 2'-deoxyguanosine-3'-phosphorothioate
  modified_base 13: mod_base = OTHER; note = 5'-methyl-deoxycytidine-3'-phosphorothioate
  modified_base 14: mod_base = OTHER; note = 2'-deoxyadenosine-3'-phosphorothioate
  modified_base 15: mod_base = OTHER; note = 2'-deoxyguanosine-3'-phosphorothioate
  modified_base 16: mod_base = OTHER; note = 2'-O-methyladenosine-3'- phosphorothioate
  modified_base 17: mod_base = OTHER; note = 2'-O-methylguanosine-3'- phosphorothioate
  modified_base 18: mod_base = OTHER; note = 2'-O-methyluridine-3'-phosphorothioate
  modified_base 19: mod_base = OTHER; note = 2'-O-methyluridine-3'-phosphorothioate
  modified_base 20: mod_base = OTHER; note = 2'-O-methyluridine-3'-phosphate
  misc_feature 1..5: note = RNA
  misc_feature 6..15: note = DNA
  misc_feature 16..20: note = RNA
tagtgatcgatgcagagttt

SEQ ID NO: 34 - DNA, 20 bp, synthetic construct
  source 1..20: mol_type = other DNA; note = Description of Artificial Sequence: Synthetic oligonucleotide; note = Description of Combined DNA/RNA Molecule: Synthetic oligonucleotide
  modified_base 1: mod_base = OTHER; note = 2'-O-methylcytidine-3'- phosphorothioate
  modified_base 2: mod_base = OTHER; note = 2'-O-methylcytidine-3'- phosphorothioate
  modified_base 3: mod_base = OTHER; note = 2'-O-methyladenosine-3'- phosphorothioate
  modified_base 4: mod_base = OTHER; note = 2'-O-methylguanosine-3'- phosphorothioate
  modified_base 5: mod_base = OTHER; note = 2'-O-methylguanosine-3'- phosphorothioate
  modified_base 6: mod_base = OTHER; note = 2'-deoxyadenosine-3'-phosphorothioate
  modified_base 7: mod_base = OTHER; note = 2'-deoxyadenosine-3'-phosphorothioate
  modified_base 8: mod_base = OTHER; note = 2'-deoxyguanosine-3'-phosphorothioate
  modified_base 9: mod_base = OTHER; note = 2'-deoxythymidine-3'-phosphorothioate
  modified_base 10: mod_base = OTHER; note = 5'-methyl-deoxycytidine-3'-phosphorothioate
  modified_base 11: mod_base = OTHER; note = 2'-deoxythymidine-3'-phosphorothioate
  modified_base 12: mod_base = OTHER; note = 2'-deoxythymidine-3'-phosphorothioate
  modified_base 13: mod_base = OTHER; note = 2'-deoxyadenosine-3'-phosphorothioate
  modified_base 14: mod_base = OTHER; note = 2'-deoxyguanosine-3'-phosphorothioate
  modified_base 15: mod_base = OTHER; note = 2'-deoxythymidine-3'-phosphorothioate
  modified_base 16: mod_base = OTHER; note = 2'-O-methylguanosine-3'- phosphorothioate
  modified_base 17: mod_base = OTHER; note = 2'-O-methyladenosine-3'- phosphorothioate
  modified_base 18: mod_base = OTHER; note = 2'-O-methyluridine-3'-phosphorothioate
  modified_base 19: mod_base = OTHER; note = 2'-O-methylcytidine-3'- phosphorothioate
  modified_base 20: mod_base = OTHER; note = 2'-O-methylguanosine-3'-phosphate
  misc_feature 1..5: note = RNA
  misc_feature 6..15: note = DNA
  misc_feature 16..20: note = RNA
ccaggaagtcttagtgatcg

SEQ ID NO: 35 - DNA, 20 bp, synthetic construct
  source 1..20: mol_type = other DNA; note = Description of Artificial Sequence: Synthetic oligonucleotide; note = Description of Combined DNA/RNA Molecule: Synthetic oligonucleotide
  modified_base 1: mod_base = OTHER; note = 2'-O-methylguanosine-3'- phosphorothioate
  modified_base 2: mod_base = OTHER; note = 2'-O-methylcytidine-3'- phosphorothioate
  modified_base 3: mod_base = OTHER; note = 2'-O-methyluridine-3'-phosphorothioate
  modified_base 4: mod_base = OTHER; note = 2'-O-methylguanosine-3'- phosphorothioate
  modified_base 5: mod_base = OTHER; note = 2'-O-methylguanosine-3'- phosphorothioate
  modified_base 6: mod_base = OTHER; note = 2'-deoxyguanosine-3'-phosphorothioate
  modified_base 7: mod_base = OTHER; note = 2'-deoxyadenosine-3'-phosphorothioate
  modified_base 8: mod_base = OTHER; note = 5'-methyl-deoxycytidine-3'-phosphorothioate
  modified_base 9: mod_base = OTHER; note = 5'-methyl-deoxycytidine-3'-phosphorothioate
  modified_base 10: mod_base = OTHER; note = 2'-deoxythymidine-3'-phosphorothioate
  modified_base 11: mod_base = OTHER; note = 5'-methyl-deoxycytidine-3'-phosphorothioate
  modified_base 12: mod_base = OTHER; note = 2'-deoxythymidine-3'-phosphorothioate
  modified_base 13: mod_base = OTHER; note = 2'-deoxythymidine-3'-phosphorothioate
  modified_base 14: mod_base = OTHER; note = 5'-methyl-deoxycytidine-3'-phosphorothioate
  modified_base 15: mod_base = OTHER; note = 5'-methyl-deoxycytidine-3'-phosphorothioate
  modified_base 16: mod_base = OTHER; note = 2'-O-methyladenosine-3'- phosphorothioate
  modified_base 17: mod_base = OTHER; note = 2'-O-methylguanosine-3'- phosphorothioate
  modified_base 18: mod_base = OTHER; note = 2'-O-methylguanosine-3'- phosphorothioate
  modified_base 19: mod_base = OTHER; note = 2'-O-methyladenosine-3'- phosphorothioate
  modified_base 20: mod_base = OTHER; note = 2'-O-methyladenosine-3'-phosphate
  misc_feature 1..5: note = RNA
  misc_feature 6..15: note = DNA
  misc_feature 16..20: note = RNA
gctgggacctcttccaggaa

SEQ ID NO: 36 - DNA, 20 bp, synthetic construct
  source 1..20: mol_type = other DNA; note = Description of Artificial Sequence: Synthetic oligonucleotide; note = Description of Combined DNA/RNA Molecule: Synthetic oligonucleotide
  modified_base 1: mod_base = OTHER; note = 2'-O-methylguanosine-3'- phosphorothioate
  modified_base 2: mod_base = OTHER; note = 2'-O-methyladenosine-3'- phosphorothioate
  modified_base 3: mod_base = OTHER; note = 2'-O-methylcytidine-3'- phosphorothioate
  modified_base 4: mod_base = OTHER; note = 2'-O-methyladenosine-3'- phosphorothioate
  modified_base 5: mod_base = OTHER; note = 2'-O-methylcytidine-3'- phosphorothioate
  modified_base 6: mod_base = OTHER; note = 2'-deoxythymidine-3'-phosphorothioate
  modified_base 7: mod_base = OTHER; note = 5'-methyl-deoxycytidine-3'-phosphorothioate
  modified_base 8: mod_base = OTHER; note = 2'-deoxyadenosine-3'-phosphorothioate
  modified_base 9: mod_base = OTHER; note = 5'-methyl-deoxycytidine-3'-phosphorothioate
  modified_base 10: mod_base = OTHER; note = 2'-deoxyguanosine-3'-phosphorothioate
  modified_base 11: mod_base = OTHER; note = 5'-methyl-deoxycytidine-3'-phosphorothioate
  modified_base 12: mod_base = OTHER; note = 2'-deoxythymidine-3'-phosphorothioate
  modified_base 13: mod_base = OTHER; note = 2'-deoxyguanosine-3'-phosphorothioate
  modified_base 14: mod_base = OTHER; note = 2'-deoxyguanosine-3'-phosphorothioate
  modified_base 15: mod_base = OTHER; note = 2'-deoxyguanosine-3'-phosphorothioate
  modified_base 16: mod_base = OTHER; note = 2'-O-methyladenosine-3'- phosphorothioate
  modified_base 17: mod_base = OTHER; note = 2'-O-methylcytidine-3'- phosphorothioate
  modified_base 18: mod_base = OTHER; note = 2'-O-methylcytidine-3'- phosphorothioate
  modified_base 19: mod_base = OTHER; note = 2'-O-methyluridine-3'-phosphorothioate
  modified_base 20: mod_base = OTHER; note = 2'-O-methylcytidine-3'-phosphate
  misc_feature 1..5: note = RNA
  misc_feature 6..15: note = DNA
  misc_feature 16..20: note = RNA
gacactcacgctgggacctc

SEQ ID NO: 37 - DNA, 20 bp, synthetic construct
  source 1..20: mol_type = other DNA; note = Description of Artificial Sequence: Synthetic oligonucleotide; note = Description of Combined DNA/RNA Molecule: Synthetic oligonucleotide
  modified_base 1: mod_base = OTHER; note = 2'-O-methylguanosine-3'- phosphorothioate
  modified_base 2: mod_base = OTHER; note = 2'-O-methyladenosine-3'- phosphorothioate
  modified_base 3: mod_base = OTHER; note = 2'-O-methyluridine-3'-phosphorothioate
  modified_base 4: mod_base = OTHER; note = 2'-O-methylguanosine-3'- phosphorothioate
  modified_base 5: mod_base = OTHER; note = 2'-O-methylcytidine-3'- phosphorothioate
  modified_base 6: mod_base = OTHER; note = 5'-methyl-deoxycytidine-3'-phosphorothioate
  modified_base 7: mod_base = OTHER; note = 2'-deoxyadenosine-3'-phosphorothioate
  modified_base 8: mod_base = OTHER; note = 2'-deoxyguanosine-3'-phosphorothioate
  modified_base 9: mod_base = OTHER; note = 2'-deoxyadenosine-3'-phosphorothioate
  modified_base 10: mod_base = OTHER; note = 2'-deoxyadenosine-3'-phosphorothioate
  modified_base 11: mod_base = OTHER; note = 2'-deoxyguanosine-3'-phosphorothioate
  modified_base 12: mod_base = OTHER; note = 5'-methyl-deoxycytidine-3'-phosphorothioate
  modified_base 13: mod_base = OTHER; note = 2'-deoxyguanosine-3'-phosphorothioate
  modified_base 14: mod_base = OTHER; note = 2'-deoxyadenosine-3'-phosphorothioate
  modified_base 15: mod_base = OTHER; note = 5'-methyl-deoxycytidine-3'-phosphorothioate
  modified_base 16: mod_base = OTHER; note = 2'-O-methyladenosine-3'- phosphorothioate
  modified_base 17: mod_base = OTHER; note = 2'-O-methylcytidine-3'- phosphorothioate
  modified_base 18: mod_base = OTHER; note = 2'-O-methyluridine-3'-phosphorothioate
  modified_base 19: mod_base = OTHER; note = 2'-O-methylcytidine-3'- phosphorothioate
  modified_base 20: mod_base = OTHER; note = 2'-O-methyladenosine-3'-phosphate
  misc_feature 1..5: note = RNA
  misc_feature 6..15: note = DNA
  misc_feature 16..20: note = RNA
gatgccagaagcgacactca

SEQ ID NO: 38 - DNA, 20 bp, synthetic construct
  source 1..20: mol_type = other DNA; note = Description of Artificial Sequence: Synthetic oligonucleotide; note = Description of Combined DNA/RNA Molecule: Synthetic oligonucleotide
  modified_base 1: mod_base = OTHER; note = 2'-O-methylcytidine-3'- phosphorothioate
  modified_base 2: mod_base = OTHER; note = 2'-O-methyladenosine-3'- phosphorothioate
  modified_base 3: mod_base = OTHER; note = 2'-O-methylguanosine-3'- phosphorothioate
  modified_base 4: mod_base = OTHER; note = 2'-O-methyladenosine-3'- phosphorothioate
  modified_base 5: mod_base = OTHER; note = 2'-O-methyladenosine-3'- phosphorothioate
  modified_base 6: mod_base = OTHER; note = 2'-deoxyguanosine-3'-phosphorothioate
  modified_base 7: mod_base = OTHER; note = 2'-deoxyguanosine-3'-phosphorothioate
  modified_base 8: mod_base = OTHER; note = 2'-deoxyadenosine-3'-phosphorothioate
  modified_base 9: mod_base = OTHER; note = 5'-methyl-deoxycytidine-3'-phosphorothioate
  modified_base 10: mod_base = OTHER; note = 2'-deoxyadenosine-3'-phosphorothioate
  modified_base 11: mod_base = OTHER; note = 2'-deoxyguanosine-3'-phosphorothioate
  modified_base 12: mod_base = OTHER; note = 2'-deoxyadenosine-3'-phosphorothioate
  modified_base 13: mod_base = OTHER; note = 2'-deoxythymidine-3'-phosphorothioate
  modified_base 14: mod_base = OTHER; note = 2'-deoxyguanosine-3'-phosphorothioate
  modified_base 15: mod_base = OTHER; note = 5'-methyl-deoxycytidine-3'-phosphorothioate
  modified_base 16: mod_base = OTHER; note = 2'-O-methylcytidine-3'- phosphorothioate
  modified_base 17: mod_base = OTHER; note = 2'-O-methyladenosine-3'- phosphorothioate
  modified_base 18: mod_base = OTHER; note = 2'-O-methylguanosine-3'- phosphorothioate
  modified_base 19: mod_base = OTHER; note = 2'-O-methyladenosine-3'- phosphorothioate
  modified_base 20: mod_base = OTHER; note = 2'-O-methyladenosine-3'-phosphate
  misc_feature 1..5: note = RNA
  misc_feature 6..15: note = DNA
  misc_feature 16..20: note = RNA
cagaaggacagatgccagaa

SEQ ID NO: 39 - DNA, 20 bp, synthetic construct
  source 1..20: mol_type = other DNA; note = Description of Artificial Sequence: Synthetic oligonucleotide; note = Description of Combined DNA/RNA Molecule: Synthetic oligonucleotide
  modified_base 1: mod_base = OTHER; note = 2'-O-methyladenosine-3'- phosphorothioate
  modified_base 2: mod_base = OTHER; note = 2'-O-methylcytidine-3'- phosphorothioate
  modified_base 3: mod_base = OTHER; note = 2'-O-methylcytidine-3'- phosphorothioate
  modified_base 4: mod_base = OTHER; note = 2'-O-methyladenosine-3'- phosphorothioate
  modified_base 5: mod_base = OTHER; note = 2'-O-methylcytidine-3'- phosphorothioate
  modified_base 6: mod_base = OTHER; note = 2'-deoxyadenosine-3'-phosphorothioate
  modified_base 7: mod_base = OTHER; note = 2'-deoxyguanosine-3'-phosphorothioate
  modified_base 8: mod_base = OTHER; note = 2'-deoxyguanosine-3'-phosphorothioate
  modified_base 9: mod_base = OTHER; note = 5'-methyl-deoxycytidine-3'-phosphorothioate
  modified_base 10: mod_base = OTHER; note = 2'-deoxythymidine-3'-phosphorothioate
  modified_base 11: mod_base = OTHER; note = 2'-deoxyguanosine-3'-phosphorothioate
  modified_base 12: mod_base = OTHER; note = 2'-deoxyguanosine-3'-phosphorothioate
  modified_base 13: mod_base = OTHER; note = 5'-methyl-deoxycytidine-3'-phosphorothioate
  modified_base 14: mod_base = OTHER; note = 5'-methyl-deoxycytidine-3'-phosphorothioate
  modified_base 15: mod_base = OTHER; note = 2'-deoxyadenosine-3'-phosphorothioate
  modified_base 16: mod_base = OTHER; note = 2'-O-methylguanosine-3'- phosphorothioate
  modified_base 17: mod_base = OTHER; note = 2'-O-methyladenosine-3'- phosphorothioate
  modified_base 18: mod_base = OTHER; note = 2'-O-methyladenosine-3'- phosphorothioate
  modified_base 19: mod_base = OTHER; note = 2'-O-methylguanosine-3'- phosphorothioate
  modified_base 20: mod_base = OTHER; note = 2'-O-methylguanosine-3'-phosphate
  misc_feature 1..5: note = RNA
  misc_feature 6..15: note = DNA
  misc_feature 16..20: note = RNA
accacaggctggccagaagg

SEQ ID NO: 40 - DNA, 20 bp, synthetic construct
  source 1..20: mol_type = other DNA; note = Description of Artificial Sequence: Synthetic oligonucleotide; note = Description of Combined DNA/RNA Molecule: Synthetic oligonucleotide
  modified_base 1: mod_base = OTHER; note = 2'-O-methyladenosine-3'- phosphorothioate
  modified_base 2: mod_base = OTHER; note = 2'-O-methylcytidine-3'- phosphorothioate
  modified_base 3: mod_base = OTHER; note = 2'-O-methyluridine-3'-phosphorothioate
  modified_base 4: mod_base = OTHER; note = 2'-O-methyluridine-3'-phosphorothioate
  modified_base 5: mod_base = OTHER; note = 2'-O-methylguanosine-3'- phosphorothioate
  modified_base 6: mod_base = OTHER; note = 2'-deoxyguanosine-3'-phosphorothioate
  modified_base 7: mod_base = OTHER; note = 5'-methyl-deoxycytidine-3'-phosphorothioate
  modified_base 8: mod_base = OTHER; note = 5'-methyl-deoxycytidine-3'-phosphorothioate
  modified_base 9: mod_base = OTHER; note = 2'-deoxyadenosine-3'-phosphorothioate
  modified_base 10: mod_base = OTHER; note = 2'-deoxyguanosine-3'-phosphorothioate
  modified_base 11: mod_base = OTHER; note = 2'-deoxyadenosine-3'-phosphorothioate
  modified_base 12: mod_base = OTHER; note = 5'-methyl-deoxycytidine-3'-phosphorothioate
  modified_base 13: mod_base = OTHER; note = 5'-methyl-deoxycytidine-3'-phosphorothioate
  modified_base 14: mod_base = OTHER; note = 2'-deoxyadenosine-3'-phosphorothioate
  modified_base 15: mod_base = OTHER; note = 5'-methyl-deoxycytidine-3'-phosphorothioate
  modified_base 16: mod_base = OTHER; note = 2'-O-methyladenosine-3'- phosphorothioate
  modified_base 17: mod_base = OTHER; note = 2'-O-methylguanosine-3'- phosphorothioate
  modified_base 18: mod_base = OTHER; note = 2'-O-methylguanosine-3'- phosphorothioate
  modified_base 19: mod_base = OTHER; note = 2'-O-methylcytidine-3'- phosphorothioate
  modified_base 20: mod_base = OTHER; note = 2'-O-methyluridine-3'-phosphate
  misc_feature 1..5: note = RNA
  misc_feature 6..15: note = DNA
  misc_feature 16..20: note = RNA
acttggccagaccacaggct

SEQ ID NO: 41 - DNA, 20 bp, synthetic construct
  source 1..20: mol_type = other DNA; note = Description of Artificial Sequence: Synthetic oligonucleotide; note = Description of Combined DNA/RNA Molecule: Synthetic oligonucleotide
  modified_base 1: mod_base = OTHER; note = 2'-O-methylguanosine-3'- phosphorothioate
  modified_base 2: mod_base = OTHER; note = 2'-O-methyladenosine-3'- phosphorothioate
  modified_base 3: mod_base = OTHER; note = 2'-O-methylguanosine-3'- phosphorothioate
  modified_base 4: mod_base = OTHER; note = 2'-O-methylguanosine-3'- phosphorothioate
  modified_base 5: mod_base = OTHER; note = 2'-O-methylguanosine-3'- phosphorothioate
  modified_base 6: mod_base = OTHER; note = 2'-deoxythymidine-3'-phosphorothioate
  modified_base 7: mod_base = OTHER; note = 2'-deoxythymidine-3'-phosphorothioate
  modified_base 8: mod_base = OTHER; note = 2'-deoxyadenosine-3'-phosphorothioate
  modified_base 9: mod_base = OTHER; note = 5'-methyl-deoxycytidine-3'-phosphorothioate
  modified_base 10: mod_base = OTHER; note = 2'-deoxyadenosine-3'-phosphorothioate
  modified_base 11: mod_base = OTHER; note = 2'-deoxythymidine-3'-phosphorothioate
  modified_base 12: mod_base = OTHER; note = 5'-methyl-deoxycytidine-3'-phosphorothioate
  modified_base 13: mod_base = OTHER; note = 2'-deoxyadenosine-3'-phosphorothioate
  modified_base 14: mod_base = OTHER; note = 5'-methyl-deoxycytidine-3'-phosphorothioate
  modified_base 15: mod_base = OTHER; note = 2'-deoxythymidine-3'-phosphorothioate
  modified_base 16: mod_base = OTHER; note = 2'-O-methyluridine-3'-phosphorothioate
  modified_base 17: mod_base = OTHER; note = 2'-O-methylguanosine-3'- phosphorothioate
  modified_base 18: mod_base = OTHER; note = 2'-O-methylguanosine-3'- phosphorothioate
  modified_base 19: mod_base = OTHER; note = 2'-O-methylcytidine-3'- phosphorothioate
  modified_base 20: mod_base = OTHER; note = 2'-O-methylcytidine-3'-phosphate
  misc_feature 1..5: note = RNA
  misc_feature 6..15: note = DNA
  misc_feature 16..20: note = RNA
gagggttacatcacttggcc

SEQ ID NO: 42 - DNA, 20 bp, synthetic construct
  source 1..20: mol_type = other DNA; note = Description of Artificial Sequence: Synthetic oligonucleotide; note = Description of Combined DNA/RNA Molecule: Synthetic oligonucleotide
  modified_base 1: mod_base = OTHER; note = 2'-O-methylguanosine-3'- phosphorothioate
  modified_base 2: mod_base = OTHER; note = 2'-O-methylguanosine-3'- phosphorothioate
  modified_base 3: mod_base = OTHER; note = 2'-O-methylcytidine-3'- phosphorothioate
  modified_base 4: mod_base = OTHER; note = 2'-O-methyluridine-3'-phosphorothioate
  modified_base 5: mod_base = OTHER; note = 2'-O-methylguanosine-3'- phosphorothioate
  modified_base 6: mod_base = OTHER; note = 2'-deoxyguanosine-3'-phosphorothioate
  modified_base 7: mod_base = OTHER; note = 2'-deoxyadenosine-3'-phosphorothioate
  modified_base 8: mod_base = OTHER; note = 2'-deoxyguanosine-3'-phosphorothioate
  modified_base 9: mod_base = OTHER; note = 2'-deoxyadenosine-3'-phosphorothioate
  modified_base 10: mod_base = OTHER; note = 2'-deoxyguanosine-3'-phosphorothioate
  modified_base 11: mod_base = OTHER; note = 2'-deoxyguanosine-3'-phosphorothioate
  modified_base 12: mod_base = OTHER; note = 2'-deoxyadenosine-3'-phosphorothioate
  modified_base 13: mod_base = OTHER; note = 2'-deoxyguanosine-3'-phosphorothioate
  modified_base 14: mod_base = OTHER; note = 2'-deoxyguanosine-3'-phosphorothioate
  modified_base 15: mod_base = OTHER; note = 2'-deoxyguanosine-3'-phosphorothioate
  modified_base 16: mod_base = OTHER; note = 2'-O-methyluridine-3'-phosphorothioate
  modified_base 17: mod_base = OTHER; note = 2'-O-methyluridine-3'-phosphorothioate
  modified_base 18: mod_base = OTHER; note = 2'-O-methyladenosine-3'- phosphorothioate
  modified_base 19: mod_base = OTHER; note = 2'-O-methylcytidine-3'- phosphorothioate
  modified_base 20: mod_base = OTHER; note = 2'-O-methyladenosine-3'-phosphate
  misc_feature 1..5: note = RNA
  misc_feature 6..15: note = DNA
  misc_feature 16..20: note = RNA
ggctggagaggagggttaca

SEQ ID NO: 43 - DNA, 20 bp, synthetic construct
  source 1..20: mol_type = other DNA; note = Description of Artificial Sequence: Synthetic oligonucleotide; note = Description of Combined DNA/RNA Molecule: Synthetic oligonucleotide
  modified_base 1: mod_base = OTHER; note = 2'-O-methylguanosine-3'- phosphorothioate
  modified_base 2: mod_base = OTHER; note = 2'-O-methylcytidine-3'- phosphorothioate
  modified_base 3: mod_base = OTHER; note = 2'-O-methylcytidine-3'- phosphorothioate
  modified_base 4: mod_base = OTHER; note = 2'-O-methyluridine-3'-phosphorothioate
  modified_base 5: mod_base = OTHER; note = 2'-O-methylguanosine-3'- phosphorothioate
  modified_base 6: mod_base = OTHER; note = 2'-deoxythymidine-3'-phosphorothioate
  modified_base 7: mod_base = OTHER; note = 2'-deoxyguanosine-3'-phosphorothioate
  modified_base 8: mod_base = OTHER; note = 5'-methyl-deoxycytidine-3'-phosphorothioate
  modified_base 9: mod_base = OTHER; note = 2'-deoxyadenosine-3'-phosphorothioate
  modified_base 10: mod_base = OTHER; note = 5'-methyl-deoxycytidine-3'-phosphorothioate
  modified_base 11: mod_base = OTHER; note = 2'-deoxyadenosine-3'-phosphorothioate
  modified_base 12: mod_base = OTHER; note = 2'-deoxyguanosine-3'-phosphorothioate
  modified_base 13: mod_base = OTHER; note = 2'-deoxyguanosine-3'-phosphorothioate
  modified_base 14: mod_base = OTHER; note = 5'-methyl-deoxycytidine-3'-phosphorothioate
  modified_base 15: mod_base = OTHER; note = 2'-deoxythymidine-3'-phosphorothioate
  modified_base 16: mod_base = OTHER; note = 2'-O-methylguanosine-3'- phosphorothioate
  modified_base 17: mod_base = OTHER; note = 2'-O-methylguanosine-3'- phosphorothioate
  modified_base 18: mod_base = OTHER; note = 2'-O-methyladenosine-3'- phosphorothioate
  modified_base 19: mod_base = OTHER; note = 2'-O-methylguanosine-3'- phosphorothioate
  modified_base 20: mod_base = OTHER; note = 2'-O-methyladenosine-3'-phosphate
  misc_feature 1..5: note = RNA
  misc_feature 6..15: note = DNA
  misc_feature 16..20: note = RNA
gcctgtgcacaggctggaga

SEQ ID NO: 44 - DNA, 20 bp, synthetic construct
  source 1..20: mol_type = other DNA; note = Description of Artificial Sequence: Synthetic oligonucleotide; note = Description of Combined DNA/RNA Molecule: Synthetic oligonucleotide
  modified_base 1: mod_base = OTHER; note = 2'-O-methylguanosine-3'- phosphorothioate
  modified_base 2: mod_base = OTHER; note = 2'-O-methyluridine-3'-phosphorothioate
  modified_base 3: mod_base = OTHER; note = 2'-O-methyluridine-3'-phosphorothioate
  modified_base 4: mod_base = OTHER; note = 2'-O-methylcytidine-3'- phosphorothioate
  modified_base 5: mod_base = OTHER; note = 2'-O-methylcytidine-3'- phosphorothioate
  modified_base 6: mod_base = OTHER; note = 5'-methyl-deoxycytidine-3'-phosphorothioate
  modified_base 7: mod_base = OTHER; note = 2'-deoxyadenosine-3'-phosphorothioate
  modified_base 8: mod_base = OTHER; note = 2'-deoxyguanosine-3'-phosphorothioate
  modified_base 9: mod_base = OTHER; note = 2'-deoxyguanosine-3'-phosphorothioate
  modified_base 10: mod_base = OTHER; note = 5'-methyl-deoxycytidine-3'-phosphorothioate
  modified_base 11: mod_base = OTHER; note = 2'-deoxythymidine-3'-phosphorothioate
  modified_base 12: mod_base = OTHER; note = 2'-deoxyguanosine-3'-phosphorothioate
  modified_base 13: mod_base = OTHER; note = 5'-methyl-deoxycytidine-3'-phosphorothioate
  modified_base 14: mod_base = OTHER; note = 5'-methyl-deoxycytidine-3'-phosphorothioate
  modified_base 15: mod_base = OTHER; note = 2'-deoxythymidine-3'-phosphorothioate
  modified_base 16: mod_base = OTHER; note = 2'-O-methylguanosine-3'- phosphorothioate
  modified_base 17: mod_base = OTHER; note = 2'-O-methyluridine-3'-phosphorothioate
  modified_base 18: mod_base = OTHER; note = 2'-O-methylguanosine-3'- phosphorothioate
  modified_base 19: mod_base = OTHER; note = 2'-O-methylcytidine-3'- phosphorothioate
  modified_base 20: mod_base = OTHER; note = 2'-O-methyladenosine-3'-phosphate
  misc_feature 1..5: note = RNA
  misc_feature 6..15: note = DNA
  misc_feature 16..20: note = RNA
gttcccaggctgcctgtgca

SEQ ID NO: 45 - DNA, 20 bp, synthetic construct
  source 1..20: mol_type = other DNA; note = Description of Artificial Sequence: Synthetic oligonucleotide; note = Description of Combined DNA/RNA Molecule: Synthetic oligonucleotide
  modified_base 1: mod_base = OTHER; note = 2'-O-methylguanosine-3'- phosphorothioate
  modified_base 2: mod_base = OTHER; note = 2'-O-methylguanosine-3'- phosphorothioate
  modified_base 3: mod_base = OTHER; note = 2'-O-methylguanosine-3'- phosphorothioate
  modified_base 4: mod_base = OTHER; note = 2'-O-methyladenosine-3'- phosphorothioate
  modified_base 5: mod_base = OTHER; note = 2'-O-methyluridine-3'-phosphorothioate
  modified_base 6: mod_base = OTHER; note = 2'-deoxyguanosine-3'-phosphorothioate
  modified_base 7: mod_base = OTHER; note = 2'-deoxyguanosine-3'-phosphorothioate
  modified_base 8: mod_base = OTHER; note = 2'-deoxyadenosine-3'-phosphorothioate
  modified_base 9: mod_base = OTHER; note = 2'-deoxyguanosine-3'-phosphorothioate
  modified_base 10: mod_base = OTHER; note = 5'-methyl-deoxycytidine-3'-phosphorothioate
  modified_base 11: mod_base = OTHER; note = 2'-deoxythymidine-3'-phosphorothioate
  modified_base 12: mod_base = OTHER; note = 2'-deoxyguanosine-3'-phosphorothioate
  modified_base 13: mod_base = OTHER; note = 2'-deoxythymidine-3'-phosphorothioate
  modified_base 14: mod_base = OTHER; note = 2'-deoxythymidine-3'-phosphorothioate
  modified_base 15: mod_base = OTHER; note = 5'-methyl-deoxycytidine-3'-phosphorothioate
  modified_base 16: mod_base = OTHER; note = 2'-O-methylcytidine-3'- phosphorothioate
  modified_base 17: mod_base = OTHER; note = 2'-O-methylcytidine-3'- phosphorothioate
  modified_base 18: mod_base = OTHER; note = 2'-O-methyladenosine-3'- phosphorothioate
  modified_base 19: mod_base = OTHER; note = 2'-O-methylguanosine-3'- phosphorothioate
  modified_base 20: mod_base = OTHER; note = 2'-O-methylguanosine-3'-phosphate
  misc_feature 1..5: note = RNA
  misc_feature 6..15: note = DNA
  misc_feature 16..20: note = RNA
gggatggagctgttcccagg

SEQ ID NO: 46 - DNA, 20 bp, synthetic construct
  source 1..20: mol_type = other DNA; note = Description of Artificial Sequence: Synthetic oligonucleotide; note = Description of Combined DNA/RNA Molecule: Synthetic oligonucleotide
  modified_base 1: mod_base = OTHER; note = 2'-O-methyladenosine-3'- phosphorothioate
  modified_base 2: mod_base = OTHER; note = 2'-O-methylguanosine-3'- phosphorothioate
  modified_base 3: mod_base = OTHER; note = 2'-O-methylcytidine-3'- phosphorothioate
  modified_base 4: mod_base = OTHER; note = 2'-O-methyluridine-3'-phosphorothioate
  modified_base 5: mod_base = OTHER; note = 2'-O-methylguanosine-3'- phosphorothioate
  modified_base 6: mod_base = OTHER; note = 2'-deoxyadenosine-3'-phosphorothioate
  modified_base 7: mod_base = OTHER; note = 2'-deoxyguanosine-3'-phosphorothioate
  modified_base 8: mod_base = OTHER; note = 2'-deoxyguanosine-3'-phosphorothioate
  modified_base 9: mod_base = OTHER; note = 2'-deoxyguanosine-3'-phosphorothioate
  modified_base 10: mod_base = OTHER; note = 2'-deoxyguanosine-3'-phosphorothioate
  modified_base 11: mod_base = OTHER; note = 2'-deoxythymidine-3'-phosphorothioate
  modified_base 12: mod_base = OTHER; note = 2'-deoxyguanosine-3'-phosphorothioate
  modified_base 13: mod_base = OTHER; note = 2'-deoxyguanosine-3'-phosphorothioate
  modified_base 14: mod_base = OTHER; note = 2'-deoxyguanosine-3'-phosphorothioate
  modified_base 15: mod_base = OTHER; note = 2'-deoxyguanosine-3'-phosphorothioate
  modified_base 16: mod_base = OTHER; note = 2'-O-methyladenosine-3'- phosphorothioate
  modified_base 17: mod_base = OTHER; note = 2'-O-methyluridine-3'-phosphorothioate
  modified_base 18: mod_base = OTHER; note = 2'-O-methylguanosine-3'- phosphorothioate
  modified_base 19: mod_base = OTHER; note = 2'-O-methylguanosine-3'- phosphorothioate
  modified_base 20: mod_base = OTHER; note = 2'-O-methyladenosine-3'-phosphate
  misc_feature 1..5: note = RNA
  misc_feature 6..15: note = DNA
  misc_feature 16..20: note = RNA
agctgaggggtggggatgga

SEQ ID NO: 47 - DNA, 20 bp, synthetic construct
  source 1..20: mol_type = other DNA; note = Description of Artificial Sequence: Synthetic oligonucleotide; note = Description of Combined DNA/RNA Molecule: Synthetic oligonucleotide
  modified_base 1: mod_base = OTHER; note = 2'-O-methylguanosine-3'- phosphorothioate
  modified_base 2: mod_base = OTHER; note = 2'-O-methylcytidine-3'- phosphorothioate
  modified_base 3: mod_base = OTHER; note = 2'-O-methylcytidine-3'- phosphorothioate
  modified_base 4: mod_base = OTHER; note = 2'-O-methylcytidine-3'- phosphorothioate
  modified_base 5: mod_base = OTHER; note = 2'-O-methyluridine-3'-phosphorothioate
  modified_base 6: mod_base = OTHER; note = 2'-deoxyadenosine-3'-phosphorothioate
  modified_base 7: mod_base = OTHER; note = 2'-deoxythymidine-3'-phosphorothioate
  modified_base 8: mod_base = OTHER; note = 2'-deoxythymidine-3'-phosphorothioate
  modified_base 9: mod_base = OTHER; note = 2'-deoxythymidine-3'-phosphorothioate
  modified_base 10: mod_base = OTHER; note = 2'-deoxyadenosine-3'-phosphorothioate
  modified_base 11: mod_base = OTHER; note = 2'-deoxythymidine-3'-phosphorothioate
  modified_base 12: mod_base = OTHER; note = 2'-deoxyadenosine-3'-phosphorothioate
  modified_base 13: mod_base = OTHER; note = 2'-deoxyguanosine-3'-phosphorothioate
  modified_base 14: mod_base = OTHER; note = 5'-methyl-deoxycytidine-3'-phosphorothioate
  modified_base 15: mod_base = OTHER; note = 2'-deoxythymidine-3'-phosphorothioate
  modified_base 16: mod_base = OTHER; note = 2'-O-methylguanosine-3'- phosphorothioate
  modified_base 17: mod_base = OTHER; note = 2'-O-methyladenosine-3'- phosphorothioate
  modified_base 18: mod_base = OTHER; note = 2'-O-methylguanosine-3'- phosphorothioate
  modified_base 19: mod_base = OTHER; note = 2'-O-methylguanosine-3'- phosphorothioate
  modified_base 20: mod_base = OTHER; note = 2'-O-methylguanosine-3'-phosphate
  misc_feature 1..5: note = RNA
  misc_feature 6..15: note = DNA
  misc_feature 16..20: note = RNA
gccctatttatagctgaggg

SEQ ID NO: 48 - DNA, 20 bp, synthetic construct
  source 1..20: mol_type = other DNA; note = Description of Artificial Sequence: Synthetic oligonucleotide; note = Description of Combined DNA/RNA Molecule: Synthetic oligonucleotide
  modified_base 1: mod_base = OTHER; note = 2'-O-methylguanosine-3'- phosphorothioate
  modified_base 2: mod_base = OTHER; note = 2'-O-methylguanosine-3'- phosphorothioate
  modified_base 3: mod_base = OTHER; note = 2'-O-methylguanosine-3'- phosphorothioate
  modified_base 4: mod_base = OTHER; note = 2'-O-methyluridine-3'-phosphorothioate
  modified_base 5: mod_base = OTHER; note = 2'-O-methylcytidine-3'- phosphorothioate
  modified_base 6: mod_base = OTHER; note = 2'-deoxyadenosine-3'-phosphorothioate
  modified_base 7: mod_base = OTHER; note = 5'-methyl-deoxycytidine-3'-phosphorothioate
  modified_base 8: mod_base = OTHER; note = 2'-deoxyguanosine-3'-phosphorothioate
  modified_base 9: mod_base = OTHER; note = 2'-deoxyadenosine-3'-phosphorothioate
  modified_base 10: mod_base = OTHER; note = 2'-deoxythymidine-3'-phosphorothioate
  modified_base 11: mod_base = OTHER; note = 2'-deoxyguanosine-3'-phosphorothioate
  modified_base 12: mod_base = OTHER; note = 5'-methyl-deoxycytidine-3'-phosphorothioate
  modified_base 13: mod_base = OTHER; note = 5'-methyl-deoxycytidine-3'-phosphorothioate
  modified_base 14: mod_base = OTHER; note = 5'-methyl-deoxycytidine-3'-phosphorothioate
  modified_base 15: mod_base = OTHER; note = 2'-deoxythymidine-3'-phosphorothioate
  modified_base 16: mod_base = OTHER; note = 2'-O-methyladenosine-3'- phosphorothioate
  modified_base 17: mod_base = OTHER; note = 2'-O-methyluridine-3'-phosphorothioate
  modified_base 18: mod_base = OTHER; note = 2'-O-methyluridine-3'-phosphorothioate
  modified_base 19: mod_base = OTHER; note = 2'-O-methyluridine-3'-phosphorothioate
  modified_base 20: mod_base = OTHER; note = 2'-O-methyladenosine-3'-phosphate
  misc_feature 1..5: note = RNA
  misc_feature 6..15: note = DNA
  misc_feature 16..20: note = RNA
gggtcacgatgccctattta

SEQ ID NO: 49 - DNA, 20 bp, synthetic construct
  source 1..20: mol_type = other DNA; note = Description of Artificial Sequence: Synthetic oligonucleotide; note = Description of Combined DNA/RNA Molecule: Synthetic oligonucleotide
  modified_base 1: mod_base = OTHER; note = 2'-O-methyluridine-3'-phosphorothioate
  modified_base 2: mod_base = OTHER; note = 2'-O-methylcytidine-3'- phosphorothioate
  modified_base 3: mod_base = OTHER; note = 2'-O-methylcytidine-3'- phosphorothioate
  modified_base 4: mod_base = OTHER; note = 2'-O-methylcytidine-3'- phosphorothioate
  modified_base 5: mod_base = OTHER; note = 2'-O-methylcytidine-3'- phosphorothioate
  modified_base 6: mod_base = OTHER; note = 5'-methyl-deoxycytidine-3'-phosphorothioate
  modified_base 7: mod_base = OTHER; note = 2'-deoxyguanosine-3'-phosphorothioate
  modified_base 8: mod_base = OTHER; note = 2'-deoxyguanosine-3'-phosphorothioate
  modified_base 9: mod_base = OTHER; note = 5'-methyl-deoxycytidine-3'-phosphorothioate
  modified_base 10: mod_base = OTHER; note = 5'-methyl-deoxycytidine-3'-phosphorothioate
  modified_base 11: mod_base = OTHER; note = 2'-deoxyguanosine-3'-phosphorothioate
  modified_base 12: mod_base = OTHER; note = 2'-deoxyguanosine-3'-phosphorothioate
  modified_base 13: mod_base = OTHER; note = 2'-deoxyguanosine-3'-phosphorothioate
  modified_base 14: mod_base = OTHER; note = 2'-deoxythymidine-3'-phosphorothioate
  modified_base 15: mod_base = OTHER; note = 5'-methyl-deoxycytidine-3'-phosphorothioate
  modified_base 16: mod_base = OTHER; note = 2'-O-methyladenosine-3'- phosphorothioate
  modified_base 17: mod_base = OTHER; note = 2'-O-methylcytidine-3'- phosphorothioate
  modified_base 18: mod_base = OTHER; note = 2'-O-methylguanosine-3'- phosphorothioate
  modified_base 19: mod_base = OTHER; note = 2'-O-methyladenosine-3'- phosphorothioate
  modified_base 20: mod_base = OTHER; note = 2'-O-methyluridine-3'-phosphate
  misc_feature 1..5: note = RNA
  misc_feature 6..15: note = DNA
  misc_feature 16..20: note = RNA
tcccccggccgggtcacgat

SEQ ID NO: 50 - DNA, 20 bp, synthetic construct
  source 1..20: mol_type = other DNA; note = Description of Artificial Sequence: Synthetic oligonucleotide; note = Description of Combined DNA/RNA Molecule: Synthetic oligonucleotide
  modified_base 1: mod_base = OTHER; note = 2'-O-methyladenosine-3'- phosphorothioate
  modified_base 2: mod_base = OTHER; note = 2'-O-methylcytidine-3'- phosphorothioate
  modified_base 3: mod_base = OTHER; note = 2'-O-methylguanosine-3'- phosphorothioate
  modified_base 4: mod_base = OTHER; note = 2'-O-methylguanosine-3'- phosphorothioate
  modified_base 5: mod_base = OTHER; note = 2'-O-methylcytidine-3'- phosphorothioate
  modified_base 6: mod_base = OTHER; note = 2'-deoxyadenosine-3'-phosphorothioate
  modified_base 7: mod_base = OTHER; note = 2'-deoxyguanosine-3'-phosphorothioate
  modified_base 8: mod_base = OTHER; note = 5'-methyl-deoxycytidine-3'-phosphorothioate
  modified_base 9: mod_base = OTHER; note = 2'-deoxythymidine-3'-phosphorothioate
  modified_base 10: mod_base = OTHER; note = 2'-deoxythymidine-3'-phosphorothioate
  modified_base 11: mod_base = OTHER; note = 5'-methyl-deoxycytidine-3'-phosphorothioate
  modified_base 12: mod_base = OTHER; note = 2'-deoxythymidine-3'-phosphorothioate
  modified_base 13: mod_base = OTHER; note = 2'-deoxythymidine-3'-phosphorothioate
  modified_base 14: mod_base = OTHER; note = 5'-methyl-deoxycytidine-3'-phosphorothioate
  modified_base 15: mod_base = OTHER; note = 5'-methyl-deoxycytidine-3'-phosphorothioate
  modified_base 16: mod_base = OTHER; note = 2'-O-methylcytidine-3'- phosphorothioate
  modified_base 17: mod_base = OTHER; note = 2'-O-methylcytidine-3'- phosphorothioate
  modified_base 18: mod_base = OTHER; note = 2'-O-methylcytidine-3'- phosphorothioate
  modified_base 19: mod_base = OTHER; note = 2'-O-methylguanosine-3'- phosphorothioate
  modified_base 20: mod_base = OTHER; note = 2'-O-methylguanosine-3'-phosphate
  misc_feature 1..5: note = RNA
  misc_feature 6..15: note = DNA
  misc_feature 16..20: note = RNA
acggcagcttcttcccccgg

SEQ ID NO: 51 - DNA, 20 bp, synthetic construct
  source 1..20: mol_type = other DNA; note = Description of Artificial Sequence: Synthetic oligonucleotide; note = Description of Combined DNA/RNA Molecule: Synthetic oligonucleotide
  modified_base 1: mod_base = OTHER; note = 2'-O-methyluridine-3'-phosphorothioate
  modified_base 2: mod_base = OTHER; note = 2'-O-methyladenosine-3'- phosphorothioate
  modified_base 3: mod_base = OTHER; note = 2'-O-methylcytidine-3'- phosphorothioate
  modified_base 4: mod_base = OTHER; note = 2'-O-methylcytidine-3'- phosphorothioate
  modified_base 5: mod_base = OTHER; note = 2'-O-methylcytidine-3'- phosphorothioate
  modified_base 6: mod_base = OTHER; note = 2'-deoxyadenosine-3'-phosphorothioate
  modified_base 7: mod_base = OTHER; note = 2'-deoxyguanosine-3'-phosphorothioate
  modified_base 8: mod_base = OTHER; note = 2'-deoxyadenosine-3'-phosphorothioate
  modified_base 9: mod_base = OTHER; note = 2'-deoxyadenosine-3'-phosphorothioate
  modified_base 10: mod_base = OTHER; note = 5'-methyl-deoxycytidine-3'-phosphorothioate
  modified_base 11: mod_base = OTHER; note = 2'-deoxyadenosine-3'-phosphorothioate
  modified_base 12: mod_base = OTHER; note = 2'-deoxyadenosine-3'-phosphorothioate
  modified_base 13: mod_base = OTHER; note = 5'-methyl-deoxycytidine-3'-phosphorothioate
  modified_base 14: mod_base = OTHER; note = 2'-deoxyguanosine-3'-phosphorothioate
  modified_base 15: mod_base = OTHER; note = 2'-deoxyguanosine-3'-phosphorothioate
  modified_base 16: mod_base = OTHER; note = 2'-O-methylcytidine-3'- phosphorothioate
  modified_base 17: mod_base = OTHER; note = 2'-O-methyladenosine-3'- phosphorothioate
  modified_base 18: mod_base = OTHER; note = 2'-O-methylguanosine-3'- phosphorothioate
  modified_base 19: mod_base = OTHER; note = 2'-O-methylcytidine-3'- phosphorothioate
  modified_base 20: mod_base = OTHER; note = 2'-O-methyluridine-3'-phosphate
  misc_feature 1..5: note = RNA
  misc_feature 6..15: note = DNA
  misc_feature 16..20: note = RNA
tacccagaacaacggcagct

SEQ ID NO: 52 - DNA, 20 bp, synthetic construct
  source 1..20: mol_type = other DNA; note = Description of Artificial Sequence: Synthetic oligonucleotide; note = Description of Combined DNA/RNA Molecule: Synthetic oligonucleotide
  modified_base 1: mod_base = OTHER; note = 2'-O-methyluridine-3'-phosphorothioate
  modified_base 2: mod_base = OTHER; note = 2'-O-methyluridine-3'-phosphorothioate
  modified_base 3: mod_base = OTHER; note = 2'-O-methylcytidine-3'- phosphorothioate
  modified_base 4: mod_base = OTHER; note = 2'-O-methyluridine-3'-phosphorothioate
  modified_base 5: mod_base = OTHER; note = 2'-O-methylguanosine-3'- phosphorothioate
  modified_base 6: mod_base = OTHER; note = 5'-methyl-deoxycytidine-3'-phosphorothioate
  modified_base 7: mod_base = OTHER; note = 2'-deoxythymidine-3'-phosphorothioate
  modified_base 8: mod_base = OTHER; note = 2'-deoxyguanosine-3'-phosphorothioate
  modified_base 9: mod_base = OTHER; note = 2'-deoxythymidine-3'-phosphorothioate
  modified_base 10: mod_base = OTHER; note = 2'-deoxyadenosine-3'-phosphorothioate
  modified_base 11: mod_base = OTHER; note = 2'-deoxyguanosine-3'-phosphorothioate
  modified_base 12: mod_base = OTHER; note = 2'-deoxythymidine-3'-phosphorothioate
  modified_base 13: mod_base = OTHER; note = 2'-deoxyadenosine-3'-phosphorothioate
  modified_base 14: mod_base = OTHER; note = 5'-methyl-deoxycytidine-3'-phosphorothioate
  modified_base 15: mod_base = OTHER; note = 5'-methyl-deoxycytidine-3'-phosphorothioate
  modified_base 16: mod_base = OTHER; note = 2'-O-methylcytidine-3'- phosphorothioate
  modified_base 17: mod_base = OTHER; note = 2'-O-methyladenosine-3'- phosphorothioate
  modified_base 18: mod_base = OTHER; note = 2'-O-methylguanosine-3'- phosphorothioate
  modified_base 19: mod_base = OTHER; note = 2'-O-methyladenosine-3'- phosphorothioate
  modified_base 20: mod_base = OTHER; note = 2'-O-methyladenosine-3'-phosphate
  misc_feature 1..5: note = RNA
  misc_feature 6..15: note = DNA
  misc_feature 16..20: note = RNA
ttctgctgtagtacccagaa

SEQ ID NO: 53 - DNA, 20 bp, synthetic construct
  source 1..20: mol_type = other DNA; note = Description of Artificial Sequence: Synthetic oligonucleotide; note = Description of Combined DNA/RNA Molecule: Synthetic oligonucleotide
  modified_base 1: mod_base = OTHER; note = 2'-O-methylcytidine-3'- phosphorothioate
  modified_base 2: mod_base = OTHER; note = 2'-O-methylcytidine-3'- phosphorothioate
  modified_base 3: mod_base = OTHER; note = 2'-O-methylguanosine-3'- phosphorothioate
  modified_base 4: mod_base = OTHER; note = 2'-O-methylcytidine-3'- phosphorothioate
  modified_base 5: mod_base = OTHER; note = 2'-O-methyladenosine-3'- phosphorothioate
  modified_base 6: mod_base = OTHER; note = 2'-deoxythymidine-3'-phosphorothioate
  modified_base 7: mod_base = OTHER; note = 2'-deoxyadenosine-3'-phosphorothioate
  modified_base 8: mod_base = OTHER; note = 5'-methyl-deoxycytidine-3'-phosphorothioate
  modified_base 9: mod_base = OTHER; note = 5'-methyl-deoxycytidine-3'-phosphorothioate
  modified_base 10: mod_base = OTHER; note = 5'-methyl-deoxycytidine-3'-phosphorothioate
  modified_base 11: mod_base = OTHER; note = 2'-deoxythymidine-3'-phosphorothioate
  modified_base 12: mod_base = OTHER; note = 2'-deoxythymidine-3'-phosphorothioate
  modified_base 13: mod_base = OTHER; note = 5'-methyl-deoxycytidine-3'-phosphorothioate
  modified_base 14: mod_base = OTHER; note = 2'-deoxythymidine-3'-phosphorothioate
  modified_base 15: mod_base = OTHER; note = 2'-deoxyguanosine-3'-phosphorothioate
  modified_base 16: mod_base = OTHER; note = 2'-O-methylcytidine-3'- phosphorothioate
  modified_base 17: mod_base = OTHER; note = 2'-O-methyluridine-3'-phosphorothioate
  modified_base 18: mod_base = OTHER; note = 2'-O-methylguanosine-3'- phosphorothioate
  modified_base 19: mod_base = OTHER; note = 2'-O-methyluridine-3'-phosphorothioate
  modified_base 20: mod_base = OTHER; note = 2'-O-methyladenosine-3'-phosphate
  misc_feature 1..5: note = RNA
  misc_feature 6..15: note = DNA
  misc_feature 16..20: note = RNA
ccgcatacccttctgctgta

SEQ ID NO: 54 - DNA, 20 bp, synthetic construct
  source 1..20: mol_type = other DNA; note = Description of Artificial Sequence: Synthetic oligonucleotide; note = Description of Combined DNA/RNA Molecule: Synthetic oligonucleotide
  modified_base 1: mod_base = OTHER; note = 2'-O-methylguanosine-3'- phosphorothioate
  modified_base 2: mod_base = OTHER; note = 2'-O-methylguanosine-3'- phosphorothioate
  modified_base 3: mod_base = OTHER; note = 2'-O-methylguanosine-3'- phosphorothioate
  modified_base 4: mod_base = OTHER; note = 2'-O-methylguanosine-3'- phosphorothioate
  modified_base 5: mod_base = OTHER; note = 2'-O-methyluridine-3'-phosphorothioate
  modified_base 6: mod_base = OTHER; note = 2'-deoxyguanosine-3'-phosphorothioate
  modified_base 7: mod_base = OTHER; note = 5'-methyl-deoxycytidine-3'-phosphorothioate
  modified_base 8: mod_base = OTHER; note = 2'-deoxythymidine-3'-phosphorothioate
  modified_base 9: mod_base = OTHER; note = 5'-methyl-deoxycytidine-3'-phosphorothioate
  modified_base 10: mod_base = OTHER; note = 2'-deoxyguanosine-3'-phosphorothioate
  modified_base 11: mod_base = OTHER; note = 5'-methyl-deoxycytidine-3'-phosphorothioate
  modified_base 12: mod_base = OTHER; note = 2'-deoxythymidine-3'-phosphorothioate
  modified_base 13: mod_base = OTHER; note = 2'-deoxythymidine-3'-phosphorothioate
  modified_base 14: mod_base = OTHER; note = 5'-methyl-deoxycytidine-3'-phosphorothioate
  modified_base 15: mod_base = OTHER; note = 5'-methyl-deoxycytidine-3'-phosphorothioate
  modified_base 16: mod_base = OTHER; note = 2'-O-methylguanosine-3'- phosphorothioate
  modified_base 17: mod_base = OTHER; note = 2'-O-methylcytidine-3'- phosphorothioate
  modified_base 18: mod_base = OTHER; note = 2'-O-methyladenosine-3'- phosphorothioate
  modified_base 19: mod_base = OTHER; note = 2'-O-methyluridine-3'-phosphorothioate
  modified_base 20: mod_base = OTHER; note = 2'-O-methyladenosine-3'-phosphate
  misc_feature 1..5: note = RNA
  misc_feature 6..15: note = DNA
  misc_feature 16..20: note = RNA
ggggtgctcgcttccgcata

SEQ ID NO: 55 - DNA, 20 bp, synthetic construct
  source 1..20: mol_type = other DNA; note = Description of Artificial Sequence: Synthetic oligonucleotide; note = Description of Combined DNA/RNA Molecule: Synthetic oligonucleotide
  modified_base 1: mod_base = OTHER; note = 2'-O-methyladenosine-3'- phosphorothioate
  modified_base 2: mod_base = OTHER; note = 2'-O-methyluridine-3'-phosphorothioate
  modified_base 3: mod_base = OTHER; note = 2'-O-methylcytidine-3'- phosphorothioate
  modified_base 4: mod_base = OTHER; note = 2'-O-methyluridine-3'-phosphorothioate
  modified_base 5: mod_base = OTHER; note = 2'-O-methylcytidine-3'- phosphorothioate
  modified_base 6: mod_base = OTHER; note = 2'-deoxyadenosine-3'-phosphorothioate
  modified_base 7: mod_base = OTHER; note = 2'-deoxyguanosine-3'-phosphorothioate
  modified_base 8: mod_base = OTHER; note = 2'-deoxyadenosine-3'-phosphorothioate
  modified_base 9: mod_base = OTHER; note = 5'-methyl-deoxycytidine-3'-phosphorothioate
  modified_base 10: mod_base = OTHER; note = 2'-deoxythymidine-3'-phosphorothioate
  modified_base 11: mod_base = OTHER; note = 2'-deoxyguanosine-3'-phosphorothioate
  modified_base 12: mod_base = OTHER; note = 2'-deoxyguanosine-3'-phosphorothioate
  modified_base 13: mod_base = OTHER; note = 2'-deoxyguanosine-3'-phosphorothioate
  modified_base 14: mod_base = OTHER; note = 2'-deoxyguanosine-3'-phosphorothioate
  modified_base 15: mod_base = OTHER; note = 2'-deoxythymidine-3'-phosphorothioate
  modified_base 16: mod_base = OTHER; note = 2'-O-methylguanosine-3'- phosphorothioate
  modified_base 17: mod_base = OTHER; note = 2'-O-methylcytidine-3'- phosphorothioate
  modified_base 18: mod_base = OTHER; note = 2'-O-methyluridine-3'-phosphorothioate
  modified_base 19: mod_base = OTHER; note = 2'-O-methylcytidine-3'- phosphorothioate
  modified_base 20: mod_base = OTHER; note = 2'-O-methylguanosine-3'-phosphate
  misc_feature 1..5: note = RNA
  misc_feature 6..15: note = DNA
  misc_feature 16..20: note = RNA
atctcagactggggtgctcg

SEQ ID NO: 56 - DNA, 20 bp, synthetic construct
  source 1..20: mol_type = other DNA; note = Description of Artificial Sequence: Synthetic oligonucleotide; note = Description of Combined DNA/RNA Molecule: Synthetic oligonucleotide
  modified_base 1: mod_base = OTHER; note = 2'-O-methylcytidine-3'- phosphorothioate
  modified_base 2: mod_base = OTHER; note = 2'-O-methylcytidine-3'- phosphorothioate
  modified_base 3: mod_base = OTHER; note = 2'-O-methylguanosine-3'- phosphorothioate
  modified_base 4: mod_base = OTHER; note = 2'-O-methylguanosine-3'- phosphorothioate
  modified_base 5: mod_base = OTHER; note = 2'-O-methylcytidine-3'- phosphorothioate
  modified_base 6: mod_base = OTHER; note = 2'-deoxyadenosine-3'-phosphorothioate
  modified_base 7: mod_base = OTHER; note = 2'-deoxyguanosine-3'-phosphorothioate
  modified_base 8: mod_base = OTHER; note = 2'-deoxyguanosine-3'-phosphorothioate
  modified_base 9: mod_base = OTHER; note = 2'-deoxyadenosine-3'-phosphorothioate
  modified_base 10: mod_base = OTHER; note = 2'-deoxyguanosine-3'-phosphorothioate
  modified_base 11: mod_base = OTHER; note = 5'-methyl-deoxycytidine-3'-phosphorothioate
  modified_base 12: mod_base = OTHER; note = 5'-methyl-deoxycytidine-3'-phosphorothioate
  modified_base 13: mod_base = OTHER; note = 2'-deoxyadenosine-3'-phosphorothioate
  modified_base 14: mod_base = OTHER; note = 2'-deoxythymidine-3'-phosphorothioate
  modified_base 15: mod_base = OTHER; note = 5'-methyl-deoxycytidine-3'-phosphorothioate
  modified_base 16: mod_base = OTHER; note = 2'-O-methyluridine-3'-phosphorothioate
  modified_base 17: mod_base = OTHER; note = 2'-O-methylcytidine-3'- phosphorothioate
  modified_base 18: mod_base = OTHER; note = 2'-O-methyladenosine-3'- phosphorothioate
  modified_base 19: mod_base = OTHER; note = 2'-O-methylguanosine-3'- phosphorothioate
  modified_base 20: mod_base = OTHER; note = 2'-O-methyladenosine-3'-phosphate
  misc_feature 1..5: note = RNA
  misc_feature 6..15: note = DNA
  misc_feature 16..20: note = RNA
ccggcaggagccatctcaga

SEQ ID NO: 57 - DNA, 20 bp, synthetic construct
  source 1..20: mol_type = other DNA; note = Description of Artificial Sequence: Synthetic oligonucleotide; note = Description of Combined DNA/RNA Molecule: Synthetic oligonucleotide
  modified_base 1: mod_base = OTHER; note = 2'-O-methylcytidine-3'- phosphorothioate
  modified_base 2: mod_base = OTHER; note = 2'-O-methyladenosine-3'- phosphorothioate
  modified_base 3: mod_base = OTHER; note = 2'-O-methylguanosine-3'- phosphorothioate
  modified_base 4: mod_base = OTHER; note = 2'-O-methylguanosine-3'- phosphorothioate
  modified_base 5: mod_base = OTHER; note = 2'-O-methylcytidine-3'- phosphorothioate
  modified_base 6: mod_base = OTHER; note = 2'-deoxythymidine-3'-phosphorothioate
  modified_base 7: mod_base = OTHER; note = 5'-methyl-deoxycytidine-3'-phosphorothioate
  modified_base 8: mod_base = OTHER; note = 2'-deoxyadenosine-3'-phosphorothioate
  modified_base 9: mod_base = OTHER; note = 5'-methyl-deoxycytidine-3'-phosphorothioate
  modified_base 10: mod_base = OTHER; note = 2'-deoxyadenosine-3'-phosphorothioate
  modified_base 11: mod_base = OTHER; note = 5'-methyl-deoxycytidine-3'-phosphorothioate
  modified_base 12: mod_base = OTHER; note = 5'-methyl-deoxycytidine-3'-phosphorothioate
  modified_base 13: mod_base = OTHER; note = 2'-deoxyguanosine-3'-phosphorothioate
  modified_base 14: mod_base = OTHER; note = 2'-deoxyguanosine-3'-phosphorothioate
  modified_base 15: mod_base = OTHER; note = 5'-methyl-deoxycytidine-3'-phosphorothioate
  modified_base 16: mod_base = OTHER; note = 2'-O-methyladenosine-3'- phosphorothioate
  modified_base 17: mod_base = OTHER; note = 2'-O-methylguanosine-3'- phosphorothioate
  modified_base 18: mod_base = OTHER; note = 2'-O-methylguanosine-3'- phosphorothioate
  modified_base 19: mod_base = OTHER; note = 2'-O-methyladenosine-3'- phosphorothioate
  modified_base 20: mod_base = OTHER; note = 2'-O-methylguanosine-3'-phosphate
  misc_feature 1..5: note = RNA
  misc_feature 6..15: note = DNA
  misc_feature 16..20: note = RNA
caggctcacaccggcaggag

SEQ ID NO: 58 - DNA, 20 bp, synthetic construct
  source 1..20: mol_type = other DNA; note = Description of Artificial Sequence: Synthetic oligonucleotide; note = Description of Combined DNA/RNA Molecule: Synthetic oligonucleotide
  modified_base 1: mod_base = OTHER; note = 2'-O-methyluridine-3'-phosphorothioate
  modified_base 2: mod_base = OTHER; note = 2'-O-methylguanosine-3'- phosphorothioate
  modified_base 3: mod_base = OTHER; note = 2'-O-methylguanosine-3'- phosphorothioate
  modified_base 4: mod_base = OTHER; note = 2'-O-methyluridine-3'-phosphorothioate
  modified_base 5: mod_base = OTHER; note = 2'-O-methylguanosine-3'- phosphorothioate
  modified_base 6: mod_base = OTHER; note = 2'-deoxyguanosine-3'-phosphorothioate
  modified_base 7: mod_base = OTHER; note = 5'-methyl-deoxycytidine-3'-phosphorothioate
  modified_base 8: mod_base = OTHER; note = 5'-methyl-deoxycytidine-3'-phosphorothioate
  modified_base 9: mod_base = OTHER; note = 5'-methyl-deoxycytidine-3'-phosphorothioate
  modified_base 10: mod_base = OTHER; note = 2'-deoxythymidine-3'-phosphorothioate
  modified_base 11: mod_base = OTHER; note = 5'-methyl-deoxycytidine-3'-phosphorothioate
  modified_base 12: mod_base = OTHER; note = 2'-deoxyadenosine-3'-phosphorothioate
  modified_base 13: mod_base = OTHER; note = 2'-deoxyguanosine-3'-phosphorothioate
  modified_base 14: mod_base = OTHER; note = 2'-deoxyguanosine-3'-phosphorothioate
  modified_base 15: mod_base = OTHER; note = 5'-methyl-deoxycytidine-3'-phosphorothioate
  modified_base 16: mod_base = OTHER; note = 2'-O-methyluridine-3'-phosphorothioate
  modified_base 17: mod_base = OTHER; note = 2'-O-methylcytidine-3'- phosphorothioate
  modified_base 18: mod_base = OTHER; note = 2'-O-methyladenosine-3'- phosphorothioate
  modified_base 19: mod_base = OTHER; note = 2'-O-methylcytidine-3'- phosphorothioate
  modified_base 20: mod_base = OTHER; note = 2'-O-methyladenosine-3'-phosphate
  misc_feature 1..5: note = RNA
  misc_feature 6..15: note = DNA
  misc_feature 16..20: note = RNA
tggtggccctcaggctcaca

SEQ ID NO: 59 - DNA, 20 bp, synthetic construct
  source 1..20: mol_type = other DNA; note = Description of Artificial Sequence: Synthetic oligonucleotide; note = Description of Combined DNA/RNA Molecule: Synthetic oligonucleotide
  modified_base 1: mod_base = OTHER; note = 2'-O-methylguanosine-3'- phosphorothioate
  modified_base 2: mod_base = OTHER; note = 2'-O-methyladenosine-3'- phosphorothioate
  modified_base 3: mod_base = OTHER; note = 2'-O-methylguanosine-3'- phosphorothioate
  modified_base 4: mod_base = OTHER; note = 2'-O-methylguanosine-3'- phosphorothioate
  modified_base 5: mod_base = OTHER; note = 2'-O-methylcytidine-3'- phosphorothioate
  modified_base 6: mod_base = OTHER; note = 2'-deoxyadenosine-3'-phosphorothioate
  modified_base 7: mod_base = OTHER; note = 2'-deoxyguanosine-3'-phosphorothioate
  modified_base 8: mod_base = OTHER; note = 2'-deoxyadenosine-3'-phosphorothioate
  modified_base 9: mod_base = OTHER; note = 2'-deoxyguanosine-3'-phosphorothioate
  modified_base 10: mod_base = OTHER; note = 2'-deoxyguanosine-3'-phosphorothioate
  modified_base 11: mod_base = OTHER; note = 2'-deoxyadenosine-3'-phosphorothioate
  modified_base 12: mod_base = OTHER; note = 2'-deoxythymidine-3'-phosphorothioate
  modified_base 13: mod_base = OTHER; note = 2'-deoxyguanosine-3'-phosphorothioate
  modified_base 14: mod_base = OTHER; note = 2'-deoxyguanosine-3'-phosphorothioate
  modified_base 15: mod_base = OTHER; note = 2'-deoxythymidine-3'-phosphorothioate
  modified_base 16: mod_base = OTHER; note = 2'-O-methylguanosine-3'- phosphorothioate
  modified_base 17: mod_base = OTHER; note = 2'-O-methylguanosine-3'- phosphorothioate
  modified_base 18: mod_base = OTHER; note = 2'-O-methylcytidine-3'- phosphorothioate
  modified_base 19: mod_base = OTHER; note = 2'-O-methylcytidine-3'- phosphorothioate
  modified_base 20: mod_base = OTHER; note = 2'-O-methylcytidine-3'-phosphate
  misc_feature 1..5: note = RNA
  misc_feature 6..15: note = DNA
  misc_feature 16..20: note = RNA
gaggcagaggatggtggccc

SEQ ID NO: 60 - DNA, 20 bp, synthetic construct
  source 1..20: mol_type = other DNA; note = Description of Artificial Sequence: Synthetic oligonucleotide; note = Description of Combined DNA/RNA Molecule: Synthetic oligonucleotide
  modified_base 1: mod_base = OTHER; note = 2'-O-methylcytidine-3'- phosphorothioate
  modified_base 2: mod_base = OTHER; note = 2'-O-methyladenosine-3'- phosphorothioate
  modified_base 3: mod_base = OTHER; note = 2'-O-methylguanosine-3'- phosphorothioate
  modified_base 4: mod_base = OTHER; note = 2'-O-methylcytidine-3'- phosphorothioate
  modified_base 5: mod_base = OTHER; note = 2'-O-methylcytidine-3'- phosphorothioate
  modified_base 6: mod_base = OTHER; note = 5'-methyl-deoxycytidine-3'-phosphorothioate
  modified_base 7: mod_base = OTHER; note = 2'-deoxyadenosine-3'-phosphorothioate
  modified_base 8: mod_base = OTHER; note = 2'-deoxyguanosine-3'-phosphorothioate
  modified_base 9: mod_base = OTHER; note = 2'-deoxyguanosine-3'-phosphorothioate
  modified_base 10: mod_base = OTHER; note = 5'-methyl-deoxycytidine-3'-phosphorothioate
  modified_base 11: mod_base = OTHER; note = 5'-methyl-deoxycytidine-3'-phosphorothioate
  modified_base 12: mod_base = OTHER; note = 2'-deoxyadenosine-3'-phosphorothioate
  modified_base 13: mod_base = OTHER; note = 2'-deoxyguanosine-3'-phosphorothioate
  modified_base 14: mod_base = OTHER; note = 2'-deoxyguanosine-3'-phosphorothioate
  modified_base 15: mod_base = OTHER; note = 2'-deoxyadenosine-3'-phosphorothioate
  modified_base 16: mod_base = OTHER; note = 2'-O-methylguanosine-3'- phosphorothioate
  modified_base 17: mod_base = OTHER; note = 2'-O-methylguanosine-3'- phosphorothioate
  modified_base 18: mod_base = OTHER; note = 2'-O-methylcytidine-3'- phosphorothioate
  modified_base 19: mod_base = OTHER; note = 2'-O-methyladenosine-3'- phosphorothioate
  modified_base 20: mod_base = OTHER; note = 2'-O-methylguanosine-3'-phosphate
  misc_feature 1..5: note = RNA
  misc_feature 6..15: note = DNA
  misc_feature 16..20: note = RNA
cagcccaggccaggaggcag

SEQ ID NO: 61 - DNA, 20 bp, synthetic construct
  source 1..20: mol_type = other DNA; note = Description of Artificial Sequence: Synthetic oligonucleotide; note = Description of Combined DNA/RNA Molecule: Synthetic oligonucleotide
  modified_base 1: mod_base = OTHER; note = 2'-O-methyluridine-3'-phosphorothioate
  modified_base 2: mod_base = OTHER; note = 2'-O-methylguanosine-3'- phosphorothioate
  modified_base 3: mod_base = OTHER; note = 2'-O-methylcytidine-3'- phosphorothioate
  modified_base 4: mod_base = OTHER; note = 2'-O-methyladenosine-3'- phosphorothioate
  modified_base 5: mod_base = OTHER; note = 2'-O-methylguanosine-3'- phosphorothioate
  modified_base 6: mod_base = OTHER; note = 5'-methyl-deoxycytidine-3'-phosphorothioate
  modified_base 7: mod_base = OTHER; note = 5'-methyl-deoxycytidine-3'-phosphorothioate
  modified_base 8: mod_base = OTHER; note = 2'-deoxyadenosine-3'-phosphorothioate
  modified_base 9: mod_base = OTHER; note = 2'-deoxyguanosine-3'-phosphorothioate
  modified_base 10: mod_base = OTHER; note = 2'-deoxyguanosine-3'-phosphorothioate
  modified_base 11: mod_base = OTHER; note = 5'-methyl-deoxycytidine-3'-phosphorothioate
  modified_base 12: mod_base = OTHER; note = 5'-methyl-deoxycytidine-3'-phosphorothioate
  modified_base 13: mod_base = OTHER; note = 2'-deoxyadenosine-3'-phosphorothioate
  modified_base 14: mod_base = OTHER; note = 2'-deoxyguanosine-3'-phosphorothioate
  modified_base 15: mod_base = OTHER; note = 5'-methyl-deoxycytidine-3'-phosphorothioate
  modified_base 16: mod_base = OTHER; note = 2'-O-methylcytidine-3'- phosphorothioate
  modified_base 17: mod_base = OTHER; note = 2'-O-methylcytidine-3'- phosphorothioate
  modified_base 18: mod_base = OTHER; note = 2'-O-methyladenosine-3'- phosphorothioate
  modified_base 19: mod_base = OTHER; note = 2'-O-methylguanosine-3'- phosphorothioate
  modified_base 20: mod_base = OTHER; note = 2'-O-methylguanosine-3'-phosphate
  misc_feature 1..5: note = RNA
  misc_feature 6..15: note = DNA
  misc_feature 16..20: note = RNA
tgcagccaggccagcccagg

SEQ ID NO: 62 - DNA, 20 bp, synthetic construct
  source 1..20: mol_type = other DNA; note = Description of Artificial Sequence: Synthetic oligonucleotide; note = Description of Combined DNA/RNA Molecule: Synthetic oligonucleotide
  modified_base 1: mod_base = OTHER; note = 2'-O-methylcytidine-3'- phosphorothioate
  modified_base 2: mod_base = OTHER; note = 2'-O-methylcytidine-3'- phosphorothioate
  modified_base 3: mod_base = OTHER; note = 2'-O-methylcytidine-3'- phosphorothioate
  modified_base 4: mod_base = OTHER; note = 2'-O-methylguanosine-3'- phosphorothioate
  modified_base 5: mod_base = OTHER; note = 2'-O-methylguanosine-3'- phosphorothioate
  modified_base 6: mod_base = OTHER; note = 2'-deoxythymidine-3'-phosphorothioate
  modified_base 7: mod_base = OTHER; note = 5'-methyl-deoxycytidine-3'-phosphorothioate
  modified_base 8: mod_base = OTHER; note = 2'-deoxyadenosine-3'-phosphorothioate
  modified_base 9: mod_base = OTHER; note = 5'-methyl-deoxycytidine-3'-phosphorothioate
  modified_base 10: mod_base = OTHER; note = 5'-methyl-deoxycytidine-3'-phosphorothioate
  modified_base 11: mod_base = OTHER; note = 2'-deoxythymidine-3'-phosphorothioate
  modified_base 12: mod_base = OTHER; note = 2'-deoxyguanosine-3'-phosphorothioate
  modified_base 13: mod_base = OTHER; note = 5'-methyl-deoxycytidine-3'-phosphorothioate
  modified_base 14: mod_base = OTHER; note = 2'-deoxyadenosine-3'-phosphorothioate
  modified_base 15: mod_base = OTHER; note = 2'-deoxyguanosine-3'-phosphorothioate
  modified_base 16: mod_base = OTHER; note = 2'-O-methylcytidine-3'- phosphorothioate
  modified_base 17: mod_base = OTHER; note = 2'-O-methylcytidine-3'- phosphorothioate
  modified_base 18: mod_base = OTHER; note = 2'-O-methyladenosine-3'- phosphorothioate
  modified_base 19: mod_base = OTHER; note = 2'-O-methylguanosine-3'- phosphorothioate
  modified_base 20: mod_base = OTHER; note = 2'-O-methylguanosine-3'-phosphate
  misc_feature 1..5: note = RNA
  misc_feature 6..15: note = DNA
  misc_feature 16..20: note = RNA
cccggtcacctgcagccagg

SEQ ID NO: 63 - DNA, 20 bp, synthetic construct
  source 1..20: mol_type = other DNA; note = Description of Artificial Sequence: Synthetic oligonucleotide; note = Description of Combined DNA/RNA Molecule: Synthetic oligonucleotide
  modified_base 1: mod_base = OTHER; note = 2'-O-methylguanosine-3'- phosphorothioate
  modified_base 2: mod_base = OTHER; note = 2'-O-methylguanosine-3'- phosphorothioate
  modified_base 3: mod_base = OTHER; note = 2'-O-methyluridine-3'-phosphorothioate
  modified_base 4: mod_base = OTHER; note = 2'-O-methylguanosine-3'- phosphorothioate
  modified_base 5: mod_base = OTHER; note = 2'-O-methyluridine-3'-phosphorothioate
  modified_base 6: mod_base = OTHER; note = 2'-deoxyadenosine-3'-phosphorothioate
  modified_base 7: mod_base = OTHER; note = 2'-deoxythymidine-3'-phosphorothioate
  modified_base 8: mod_base = OTHER; note = 2'-deoxyguanosine-3'-phosphorothioate
  modified_base 9: mod_base = OTHER; note = 2'-deoxythymidine-3'-phosphorothioate
  modified_base 10: mod_base = OTHER; note = 2'-deoxyadenosine-3'-phosphorothioate
  modified_base 11: mod_base = OTHER; note = 5'-methyl-deoxycytidine-3'-phosphorothioate
  modified_base 12: mod_base = OTHER; note = 2'-deoxyadenosine-3'-phosphorothioate
  modified_base 13: mod_base = OTHER; note = 5'-methyl-deoxycytidine-3'-phosphorothioate
  modified_base 14: mod_base = OTHER; note = 5'-methyl-deoxycytidine-3'-phosphorothioate
  modified_base 15: mod_base = OTHER; note = 5'-methyl-deoxycytidine-3'-phosphorothioate
  modified_base 16: mod_base = OTHER; note = 2'-O-methylguanosine-3'- phosphorothioate
  modified_base 17: mod_base = OTHER; note = 2'-O-methylguanosine-3'- phosphorothioate
  modified_base 18: mod_base = OTHER; note = 2'-O-methyluridine-3'-phosphorothioate
  modified_base 19: mod_base = OTHER; note = 2'-O-methylcytidine-3'- phosphorothioate
  modified_base 20: mod_base = OTHER; note = 2'-O-methyladenosine-3'-phosphate
  misc_feature 1..5: note = RNA
  misc_feature 6..15: note = DNA
  misc_feature 16..20: note = RNA
ggtgtatgtacacccggtca

SEQ ID NO: 64 - DNA, 20 bp, synthetic construct
  source 1..20: mol_type = other DNA; note = Description of Artificial Sequence: Synthetic oligonucleotide; note = Description of Combined DNA/RNA Molecule: Synthetic oligonucleotide
  modified_base 1: mod_base = OTHER; note = 2'-O-methyladenosine-3'- phosphorothioate
  modified_base 2: mod_base = OTHER; note = 2'-O-methylguanosine-3'- phosphorothioate
  modified_base 3: mod_base = OTHER; note = 2'-O-methylguanosine-3'- phosphorothioate
  modified_base 4: mod_base = OTHER; note = 2'-O-methyluridine-3'-phosphorothioate
  modified_base 5: mod_base = OTHER; note = 2'-O-methylguanosine-3'- phosphorothioate
  modified_base 6: mod_base = OTHER; note = 2'-deoxyguanosine-3'-phosphorothioate
  modified_base 7: mod_base = OTHER; note = 2'-deoxyadenosine-3'-phosphorothioate
  modified_base 8: mod_base = OTHER; note = 2'-deoxyadenosine-3'-phosphorothioate
  modified_base 9: mod_base = OTHER; note = 2'-deoxyguanosine-3'-phosphorothioate
  modified_base 10: mod_base = OTHER; note = 2'-deoxyguanosine-3'-phosphorothioate
  modified_base 11: mod_base = OTHER; note = 2'-deoxyguanosine-3'-phosphorothioate
  modified_base 12: mod_base = OTHER; note = 2'-deoxyguanosine-3'-phosphorothioate
  modified_base 13: mod_base = OTHER; note = 2'-deoxythymidine-3'-phosphorothioate
  modified_base 14: mod_base = OTHER; note = 2'-deoxyguanosine-3'-phosphorothioate
  modified_base 15: mod_base = OTHER; note = 2'-deoxythymidine-3'-phosphorothioate
  modified_base 16: mod_base = OTHER; note = 2'-O-methyladenosine-3'- phosphorothioate
  modified_base 17: mod_base = OTHER; note = 2'-O-methyluridine-3'-phosphorothioate
  modified_base 18: mod_base = OTHER; note = 2'-O-methylguanosine-3'- phosphorothioate
  modified_base 19: mod_base = OTHER; note = 2'-O-methyluridine-3'-phosphorothioate
  modified_base 20: mod_base = OTHER; note = 2'-O-methyladenosine-3'-phosphate
  misc_feature 1..5: note = RNA
  misc_feature 6..15: note = DNA
  misc_feature 16..20: note = RNA
aggtggaaggggtgtatgta

SEQ ID NO: 65 - DNA, 20 bp, synthetic construct
  source 1..20: mol_type = other DNA; note = Description of Artificial Sequence: Synthetic oligonucleotide; note = Description of Combined DNA/RNA Molecule: Synthetic oligonucleotide
  modified_base 1: mod_base = OTHER; note = 2'-O-methyluridine-3'-phosphorothioate
  modified_base 2: mod_base = OTHER; note = 2'-O-methyluridine-3'-phosphorothioate
  modified_base 3: mod_base = OTHER; note = 2'-O-methylguanosine-3'- phosphorothioate
  modified_base 4: mod_base = OTHER; note = 2'-O-methyluridine-3'-phosphorothioate
  modified_base 5: mod_base = OTHER; note = 2'-O-methylguanosine-3'- phosphorothioate
  modified_base 6: mod_base = OTHER; note = 2'-deoxyguanosine-3'-phosphorothioate
  modified_base 7: mod_base = OTHER; note = 2'-deoxyadenosine-3'-phosphorothioate
  modified_base 8: mod_base = OTHER; note = 2'-deoxythymidine-3'-phosphorothioate
  modified_base 9: mod_base = OTHER; note = 2'-deoxyguanosine-3'-phosphorothioate
  modified_base 10: mod_base = OTHER; note = 2'-deoxyadenosine-3'-phosphorothioate
  modified_base 11: mod_base = OTHER; note = 5'-methyl-deoxycytidine-3'-phosphorothioate
  modified_base 12: mod_base = OTHER; note = 2'-deoxyguanosine-3'-phosphorothioate
  modified_base 13: mod_base = OTHER; note = 2'-deoxyadenosine-3'-phosphorothioate
  modified_base 14: mod_base = OTHER; note = 2'-deoxyguanosine-3'-phosphorothioate
  modified_base 15: mod_base = OTHER; note = 2'-deoxyguanosine-3'-phosphorothioate
  modified_base 16: mod_base = OTHER; note = 2'-O-methyluridine-3'-phosphorothioate
  modified_base 17: mod_base = OTHER; note = 2'-O-methylguanosine-3'- phosphorothioate
  modified_base 18: mod_base = OTHER; note = 2'-O-methylguanosine-3'- phosphorothioate
  modified_base 19: mod_base = OTHER; note = 2'-O-methyladenosine-3'- phosphorothioate
  modified_base 20: mod_base = OTHER; note = 2'-O-methyladenosine-3'-phosphate
  misc_feature 1..5: note = RNA
  misc_feature 6..15: note = DNA
  misc_feature 16..20: note = RNA
ttgtggatgacgaggtggaa

SEQ ID NO: 66 - DNA, 20 bp, synthetic construct
  source 1..20: mol_type = other DNA; note = Description of Artificial Sequence: Synthetic oligonucleotide; note = Description of Combined DNA/RNA Molecule: Synthetic oligonucleotide
  modified_base 1: mod_base = OTHER; note = 2'-O-methylguanosine-3'- phosphorothioate
  modified_base 2: mod_base = OTHER; note = 2'-O-methylguanosine-3'- phosphorothioate
  modified_base 3: mod_base = OTHER; note = 2'-O-methyluridine-3'-phosphorothioate
  modified_base 4: mod_base = OTHER; note = 2'-O-methyladenosine-3'- phosphorothioate
  modified_base 5: mod_base = OTHER; note = 2'-O-methylcytidine-3'- phosphorothioate
  modified_base 6: mod_base = OTHER; note = 2'-deoxythymidine-3'-phosphorothioate
  modified_base 7: mod_base = OTHER; note = 5'-methyl-deoxycytidine-3'-phosphorothioate
  modified_base 8: mod_base = OTHER; note = 2'-deoxythymidine-3'-phosphorothioate
  modified_base 9: mod_base = OTHER; note = 5'-methyl-deoxycytidine-3'-phosphorothioate
  modified_base 10: mod_base = OTHER; note = 2'-deoxyadenosine-3'-phosphorothioate
  modified_base 11: mod_base = OTHER; note = 2'-deoxythymidine-3'-phosphorothioate
  modified_base 12: mod_base = OTHER; note = 2'-deoxythymidine-3'-phosphorothioate
  modified_base 13: mod_base = OTHER; note = 2'-deoxyguanosine-3'-phosphorothioate
  modified_base 14: mod_base = OTHER; note = 2'-deoxythymidine-3'-phosphorothioate
  modified_base 15: mod_base = OTHER; note = 2'-deoxyguanosine-3'-phosphorothioate
  modified_base 16: mod_base = OTHER; note = 2'-O-methylguanosine-3'- phosphorothioate
  modified_base 17: mod_base = OTHER; note = 2'-O-methyladenosine-3'- phosphorothioate
  modified_base 18: mod_base = OTHER; note = 2'-O-methyluridine-3'-phosphorothioate
  modified_base 19: mod_base = OTHER; note = 2'-O-methylguanosine-3'- phosphorothioate
  modified_base 20: mod_base = OTHER; note = 2'-O-methyladenosine-3'-phosphate
  misc_feature 1..5: note = RNA
  misc_feature 6..15: note = DNA
  misc_feature 16..20: note = RNA
ggtactctcattgtggatga

SEQ ID NO: 67 - DNA, 20 bp, synthetic construct
  source 1..20: mol_type = other DNA; note = Description of Artificial Sequence: Synthetic oligonucleotide; note = Description of Combined DNA/RNA Molecule: Synthetic oligonucleotide
  modified_base 1: mod_base = OTHER; note = 2'-O-methylcytidine-3'- phosphorothioate
  modified_base 2: mod_base = OTHER; note = 2'-O-methyladenosine-3'- phosphorothioate
  modified_base 3: mod_base = OTHER; note = 2'-O-methylguanosine-3'- phosphorothioate
  modified_base 4: mod_base = OTHER; note = 2'-O-methylcytidine-3'- phosphorothioate
  modified_base 5: mod_base = OTHER; note = 2'-O-methyluridine-3'-phosphorothioate
  modified_base 6: mod_base = OTHER; note = 2'-deoxyguanosine-3'-phosphorothioate
  modified_base 7: mod_base = OTHER; note = 5'-methyl-deoxycytidine-3'-phosphorothioate
  modified_base 8: mod_base = OTHER; note = 2'-deoxythymidine-3'-phosphorothioate
  modified_base 9: mod_base = OTHER; note = 5'-methyl-deoxycytidine-3'-phosphorothioate
  modified_base 10: mod_base = OTHER; note = 2'-deoxyadenosine-3'-phosphorothioate
  modified_base 11: mod_base = OTHER; note = 5'-methyl-deoxycytidine-3'-phosphorothioate
  modified_base 12: mod_base = OTHER; note = 2'-deoxyadenosine-3'-phosphorothioate
  modified_base 13: mod_base = OTHER; note = 2'-deoxyguanosine-3'-phosphorothioate
  modified_base 14: mod_base = OTHER; note = 2'-deoxyguanosine-3'-phosphorothioate
  modified_base 15: mod_base = OTHER; note = 2'-deoxythymidine-3'-phosphorothioate
  modified_base 16: mod_base = OTHER; note = 2'-O-methyladenosine-3'- phosphorothioate
  modified_base 17: mod_base = OTHER; note = 2'-O-methylcytidine-3'- phosphorothioate
  modified_base 18: mod_base = OTHER; note = 2'-O-methyluridine-3'-phosphorothioate
  modified_base 19: mod_base = OTHER; note = 2'-O-methylcytidine-3'- phosphorothioate
  modified_base 20: mod_base = OTHER; note = 2'-O-methyluridine-3'-phosphate
  misc_feature 1..5: note = RNA
  misc_feature 6..15: note = DNA
  misc_feature 16..20: note = RNA
cagctgctcacaggtactct

SEQ ID NO: 68 - DNA, 20 bp, synthetic construct
  source 1..20: mol_type = other DNA; note = Description of Artificial Sequence: Synthetic oligonucleotide; note = Description of Combined DNA/RNA Molecule: Synthetic oligonucleotide
  modified_base 1: mod_base = OTHER; note = 2'-O-methyluridine-3'-phosphorothioate
  modified_base 2: mod_base = OTHER; note = 2'-O-methylguanosine-3'- phosphorothioate
  modified_base 3: mod_base = OTHER; note = 2'-O-methylguanosine-3'- phosphorothioate
  modified_base 4: mod_base = OTHER; note = 2'-O-methylcytidine-3'- phosphorothioate
  modified_base 5: mod_base = OTHER; note = 2'-O-methylcytidine-3'- phosphorothioate
  modified_base 6: mod_base = OTHER; note = 2'-deoxythymidine-3'-phosphorothioate
  modified_base 7: mod_base = OTHER; note = 2'-deoxythymidine-3'-phosphorothioate
  modified_base 8: mod_base = OTHER; note = 2'-deoxythymidine-3'-phosphorothioate
  modified_base 9: mod_base = OTHER; note = 2'-deoxyguanosine-3'-phosphorothioate
  modified_base 10: mod_base = OTHER; note = 5'-methyl-deoxycytidine-3'-phosphorothioate
  modified_base 11: mod_base = OTHER; note = 5'-methyl-deoxycytidine-3'-phosphorothioate
  modified_base 12: mod_base = OTHER; note = 2'-deoxyadenosine-3'-phosphorothioate
  modified_base 13: mod_base = OTHER; note = 2'-deoxyguanosine-3'-phosphorothioate
  modified_base 14: mod_base = OTHER; note = 5'-methyl-deoxycytidine-3'-phosphorothioate
  modified_base 15: mod_base = OTHER; note = 2'-deoxythymidine-3'-phosphorothioate
  modified_base 16: mod_base = OTHER; note = 2'-O-methylguanosine-3'- phosphorothioate
  modified_base 17: mod_base = OTHER; note = 2'-O-methylcytidine-3'- phosphorothioate
  modified_base 18: mod_base = OTHER; note = 2'-O-methyluridine-3'-phosphorothioate
  modified_base 19: mod_base = OTHER; note = 2'-O-methylcytidine-3'- phosphorothioate
  modified_base 20: mod_base = OTHER; note = 2'-O-methyladenosine-3'-phosphate
  misc_feature 1..5: note = RNA
  misc_feature 6..15: note = DNA
  misc_feature 16..20: note = RNA
tggcctttgccagctgctca

SEQ ID NO: 69 - DNA, 20 bp, synthetic construct
  source 1..20: mol_type = other DNA; note = Description of Artificial Sequence: Synthetic oligonucleotide; note = Description of Combined DNA/RNA Molecule: Synthetic oligonucleotide
  modified_base 1: mod_base = OTHER; note = 2'-O-methylguanosine-3'- phosphorothioate
  modified_base 2: mod_base = OTHER; note = 2'-O-methylcytidine-3'- phosphorothioate
  modified_base 3: mod_base = OTHER; note = 2'-O-methyluridine-3'-phosphorothioate
  modified_base 4: mod_base = OTHER; note = 2'-O-methyluridine-3'-phosphorothioate
  modified_base 5: mod_base = OTHER; note = 2'-O-methylcytidine-3'- phosphorothioate
  modified_base 6: mod_base = OTHER; note = 5'-methyl-deoxycytidine-3'-phosphorothioate
  modified_base 7: mod_base = OTHER; note = 5'-methyl-deoxycytidine-3'-phosphorothioate
  modified_base 8: mod_base = OTHER; note = 2'-deoxyguanosine-3'-phosphorothioate
  modified_base 9: mod_base = OTHER; note = 2'-deoxyguanosine-3'-phosphorothioate
  modified_base 10: mod_base = OTHER; note = 5'-methyl-deoxycytidine-3'-phosphorothioate
  modified_base 11: mod_base = OTHER; note = 2'-deoxyadenosine-3'-phosphorothioate
  modified_base 12: mod_base = OTHER; note = 2'-deoxythymidine-3'-phosphorothioate
  modified_base 13: mod_base = OTHER; note = 2'-deoxythymidine-3'-phosphorothioate
  modified_base 14: mod_base = OTHER; note = 2'-deoxyguanosine-3'-phosphorothioate
  modified_base 15: mod_base = OTHER; note = 2'-deoxyguanosine-3'-phosphorothioate
  modified_base 16: mod_base = OTHER; note = 2'-O-methylcytidine-3'- phosphorothioate
  modified_base 17: mod_base = OTHER; note = 2'-O-methylcytidine-3'- phosphorothioate
  modified_base 18: mod_base = OTHER; note = 2'-O-methyluridine-3'-phosphorothioate
  modified_base 19: mod_base = OTHER; note = 2'-O-methyluridine-3'-phosphorothioate
  modified_base 20: mod_base = OTHER; note = 2'-O-methyluridine-3'-phosphate
  misc_feature 1..5: note = RNA
  misc_feature 6..15: note = DNA
  misc_feature 16..20: note = RNA
gcttcccggcattggccttt

SEQ ID NO: 70 - DNA, 20 bp, synthetic construct
  source 1..20: mol_type = other DNA; note = Description of Artificial Sequence: Synthetic oligonucleotide; note = Description of Combined DNA/RNA Molecule: Synthetic oligonucleotide
  modified_base 1: mod_base = OTHER; note = 2'-O-methylguanosine-3'- phosphorothioate
  modified_base 2: mod_base = OTHER; note = 2'-O-methylguanosine-3'- phosphorothioate
  modified_base 3: mod_base = OTHER; note = 2'-O-methylguanosine-3'- phosphorothioate
  modified_base 4: mod_base = OTHER; note = 2'-O-methylguanosine-3'- phosphorothioate
  modified_base 5: mod_base = OTHER; note = 2'-O-methyluridine-3'-phosphorothioate
  modified_base 6: mod_base = OTHER; note = 5'-methyl-deoxycytidine-3'-phosphorothioate
  modified_base 7: mod_base = OTHER; note = 2'-deoxythymidine-3'-phosphorothioate
  modified_base 8: mod_base = OTHER; note = 2'-deoxythymidine-3'-phosphorothioate
  modified_base 9: mod_base = OTHER; note = 2'-deoxythymidine-3'-phosphorothioate
  modified_base 10: mod_base = OTHER; note = 2'-deoxyguanosine-3'-phosphorothioate
  modified_base 11: mod_base = OTHER; note = 2'-deoxyguanosine-3'-phosphorothioate
  modified_base 12: mod_base = OTHER; note = 2'-deoxyguanosine-3'-phosphorothioate
  modified_base 13: mod_base = OTHER; note = 5'-methyl-deoxycytidine-3'-phosphorothioate
  modified_base 14: mod_base = OTHER; note = 2'-deoxythymidine-3'-phosphorothioate
  modified_base 15: mod_base = OTHER; note = 2'-deoxythymidine-3'-phosphorothioate
  modified_base 16: mod_base = OTHER; note = 2'-O-methylcytidine-3'- phosphorothioate
  modified_base 17: mod_base = OTHER; note = 2'-O-methylcytidine-3'- phosphorothioate
  modified_base 18: mod_base = OTHER; note = 2'-O-methylcytidine-3'- phosphorothioate
  modified_base 19: mod_base = OTHER; note = 2'-O-methylguanosine-3'- phosphorothioate
  modified_base 20: mod_base = OTHER; note = 2'-O-methylguanosine-3'-phosphate
  misc_feature 1..5: note = RNA
  misc_feature 6..15: note = DNA
  misc_feature 16..20: note = RNA
ggggtctttgggcttcccgg

SEQ ID NO: 71 - DNA, 20 bp, synthetic construct
  source 1..20: mol_type = other DNA; note = Description of Artificial Sequence: Synthetic oligonucleotide; note = Description of Combined DNA/RNA Molecule: Synthetic oligonucleotide
  modified_base 1: mod_base = OTHER; note = 2'-O-methylguanosine-3'- phosphorothioate
  modified_base 2: mod_base = OTHER; note = 2'-O-methylguanosine-3'- phosphorothioate
  modified_base 3: mod_base = OTHER; note = 2'-O-methyluridine-3'-phosphorothioate
  modified_base 4: mod_base = OTHER; note = 2'-O-methyladenosine-3'- phosphorothioate
  modified_base 5: mod_base = OTHER; note = 2'-O-methyluridine-3'-phosphorothioate
  modified_base 6: mod_base = OTHER; note = 2'-deoxyguanosine-3'-phosphorothioate
  modified_base 7: mod_base = OTHER; note = 2'-deoxyadenosine-3'-phosphorothioate
  modified_base 8: mod_base = OTHER; note = 2'-deoxyadenosine-3'-phosphorothioate
  modified_base 9: mod_base = OTHER; note = 2'-deoxyguanosine-3'-phosphorothioate
  modified_base 10: mod_base = OTHER; note = 2'-deoxyguanosine-3'-phosphorothioate
  modified_base 11: mod_base = OTHER; note = 2'-deoxythymidine-3'-phosphorothioate
  modified_base 12: mod_base = OTHER; note = 2'-deoxyguanosine-3'-phosphorothioate
  modified_base 13: mod_base = OTHER; note = 2'-deoxyguanosine-3'-phosphorothioate
  modified_base 14: mod_base = OTHER; note = 2'-deoxyguanosine-3'-phosphorothioate
  modified_base 15: mod_base = OTHER; note = 2'-deoxyguanosine-3'-phosphorothioate
  modified_base 16: mod_base = OTHER; note = 2'-O-methyluridine-3'-phosphorothioate
  modified_base 17: mod_base = OTHER; note = 2'-O-methylcytidine-3'- phosphorothioate
  modified_base 18: mod_base = OTHER; note = 2'-O-methyluridine-3'-phosphorothioate
  modified_base 19: mod_base = OTHER; note = 2'-O-methyluridine-3'-phosphorothioate
  modified_base 20: mod_base = OTHER; note = 2'-O-methyluridine-3'-phosphate
  misc_feature 1..5: note = RNA
  misc_feature 6..15: note = DNA
  misc_feature 16..20: note = RNA
ggtatgaaggtggggtcttt

SEQ ID NO: 72 - DNA, 20 bp, synthetic construct
  source 1..20: mol_type = other DNA; note = Description of Artificial Sequence: Synthetic oligonucleotide; note = Description of Combined DNA/RNA Molecule: Synthetic oligonucleotide
  modified_base 1: mod_base = OTHER; note = 2'-O-methyladenosine-3'- phosphorothioate
  modified_base 2: mod_base = OTHER; note = 2'-O-methyladenosine-3'- phosphorothioate
  modified_base 3: mod_base = OTHER; note = 2'-O-methyluridine-3'-phosphorothioate
  modified_base 4: mod_base = OTHER; note = 2'-O-methyluridine-3'-phosphorothioate
  modified_base 5: mod_base = OTHER; note = 2'-O-methylguanosine-3'- phosphorothioate
  modified_base 6: mod_base = OTHER; note = 2'-deoxyguanosine-3'-phosphorothioate
  modified_base 7: mod_base = OTHER; note = 2'-deoxyadenosine-3'-phosphorothioate
  modified_base 8: mod_base = OTHER; note = 2'-deoxyguanosine-3'-phosphorothioate
  modified_base 9: mod_base = OTHER; note = 5'-methyl-deoxycytidine-3'-phosphorothioate
  modified_base 10: mod_base = OTHER; note = 2'-deoxyadenosine-3'-phosphorothioate
  modified_base 11: mod_base = OTHER; note = 2'-deoxyguanosine-3'-phosphorothioate
  modified_base 12: mod_base = OTHER; note = 2'-deoxyguanosine-3'-phosphorothioate
  modified_base 13: mod_base = OTHER; note = 2'-deoxythymidine-3'-phosphorothioate
  modified_base 14: mod_base = OTHER; note = 2'-deoxyadenosine-3'-phosphorothioate
  modified_base 15: mod_base = OTHER; note = 2'-deoxythymidine-3'-phosphorothioate
  modified_base 16: mod_base = OTHER; note = 2'-O-methylguanosine-3'- phosphorothioate
  modified_base 17: mod_base = OTHER; note = 2'-O-methyladenosine-3'- phosphorothioate
  modified_base 18: mod_base = OTHER; note = 2'-O-methyladenosine-3'- phosphorothioate
  modified_base 19: mod_base = OTHER; note = 2'-O-methylguanosine-3'- phosphorothioate
  modified_base 20: mod_base = OTHER; note = 2'-O-methylguanosine-3'-phosphate
  misc_feature 1..5: note = RNA
  misc_feature 6..15: note = DNA
  misc_feature 16..20: note = RNA
aattggagcaggtatgaagg

SEQ ID NO: 73 - DNA, 20 bp, synthetic construct
  source 1..20: mol_type = other DNA; note = Description of Artificial Sequence: Synthetic oligonucleotide; note = Description of Combined DNA/RNA Molecule: Synthetic oligonucleotide
  modified_base 1: mod_base = OTHER; note = 2'-O-methyluridine-3'-phosphorothioate
  modified_base 2: mod_base = OTHER; note = 2'-O-methylguanosine-3'- phosphorothioate
  modified_base 3: mod_base = OTHER; note = 2'-O-methyluridine-3'-phosphorothioate
  modified_base 4: mod_base = OTHER; note = 2'-O-methylcytidine-3'- phosphorothioate
  modified_base 5: mod_base = OTHER; note = 2'-O-methyluridine-3'-phosphorothioate
  modified_base 6: mod_base = OTHER; note = 2'-deoxythymidine-3'-phosphorothioate
  modified_base 7: mod_base = OTHER; note = 2'-deoxyguanosine-3'-phosphorothioate
  modified_base 8: mod_base = OTHER; note = 2'-deoxyguanosine-3'-phosphorothioate
  modified_base 9: mod_base = OTHER; note = 5'-methyl-deoxycytidine-3'-phosphorothioate
  modified_base 10: mod_base = OTHER; note = 5'-methyl-deoxycytidine-3'-phosphorothioate
  modified_base 11: mod_base = OTHER; note = 2'-deoxythymidine-3'-phosphorothioate
  modified_base 12: mod_base = OTHER; note = 2'-deoxyguanosine-3'-phosphorothioate
  modified_base 13: mod_base = OTHER; note = 2'-deoxyadenosine-3'-phosphorothioate
  modified_base 14: mod_base = OTHER; note = 2'-deoxyadenosine-3'-phosphorothioate
  modified_base 15: mod_base = OTHER; note = 2'-deoxythymidine-3'-phosphorothioate
  modified_base 16: mod_base = OTHER; note = 2'-O-methyluridine-3'-phosphorothioate
  modified_base 17: mod_base = OTHER; note = 2'-O-methylguanosine-3'- phosphorothioate
  modified_base 18: mod_base = OTHER; note = 2'-O-methylguanosine-3'- phosphorothioate
  modified_base 19: mod_base = OTHER; note = 2'-O-methyladenosine-3'- phosphorothioate
  modified_base 20: mod_base = OTHER; note = 2'-O-methylguanosine-3'-phosphate
  misc_feature 1..5: note = RNA
  misc_feature 6..15: note = DNA
  misc_feature 16..20: note = RNA
tgtcttggcctgaattggag

SEQ ID NO: 74 - DNA, 20 bp, synthetic construct
  source 1..20: mol_type = other DNA; note = Description of Artificial Sequence: Synthetic oligonucleotide; note = Description of Combined DNA/RNA Molecule: Synthetic oligonucleotide
  modified_base 1: mod_base = OTHER; note = 2'-O-methylcytidine-3'- phosphorothioate
  modified_base 2: mod_base = OTHER; note = 2'-O-methyladenosine-3'- phosphorothioate
  modified_base 3: mod_base = OTHER; note = 2'-O-methylcytidine-3'- phosphorothioate
  modified_base 4: mod_base = OTHER; note = 2'-O-methyladenosine-3'- phosphorothioate
  modified_base 5: mod_base = OTHER; note = 2'-O-methylguanosine-3'- phosphorothioate
  modified_base 6: mod_base = OTHER; note = 2'-deoxyguanosine-3'-phosphorothioate
  modified_base 7: mod_base = OTHER; note = 2'-deoxyguanosine-3'-phosphorothioate
  modified_base 8: mod_base = OTHER; note = 2'-deoxyguanosine-3'-phosphorothioate
  modified_base 9: mod_base = OTHER; note = 2'-deoxyadenosine-3'-phosphorothioate
  modified_base 10: mod_base = OTHER; note = 2'-deoxythymidine-3'-phosphorothioate
  modified_base 11: mod_base = OTHER; note = 2'-deoxyguanosine-3'-phosphorothioate
  modified_base 12: mod_base = OTHER; note = 2'-deoxythymidine-3'-phosphorothioate
  modified_base 13: mod_base = OTHER; note = 5'-methyl-deoxycytidine-3'-phosphorothioate
  modified_base 14: mod_base = OTHER; note = 2'-deoxythymidine-3'-phosphorothioate
  modified_base 15: mod_base = OTHER; note = 2'-deoxythymidine-3'-phosphorothioate
  modified_base 16: mod_base = OTHER; note = 2'-O-methylguanosine-3'- phosphorothioate
  modified_base 17: mod_base = OTHER; note = 2'-O-methylguanosine-3'- phosphorothioate
  modified_base 18: mod_base = OTHER; note = 2'-O-methylcytidine-3'- phosphorothioate
  modified_base 19: mod_base = OTHER; note = 2'-O-methylcytidine-3'- phosphorothioate
  modified_base 20: mod_base = OTHER; note = 2'-O-methyluridine-3'-phosphate
  misc_feature 1..5: note = RNA
  misc_feature 6..15: note = DNA
  misc_feature 16..20: note = RNA
cacaggggatgtcttggcct

SEQ ID NO: 75 - DNA, 20 bp, synthetic construct
  source 1..20: mol_type = other DNA; note = Description of Artificial Sequence: Synthetic oligonucleotide; note = Description of Combined DNA/RNA Molecule: Synthetic oligonucleotide
  modified_base 1: mod_base = OTHER; note = 2'-O-methylguanosine-3'- phosphorothioate
  modified_base 2: mod_base = OTHER; note = 2'-O-methylcytidine-3'- phosphorothioate
  modified_base 3: mod_base = OTHER; note = 2'-O-methylcytidine-3'- phosphorothioate
  modified_base 4: mod_base = OTHER; note = 2'-O-methyluridine-3'-phosphorothioate
  modified_base 5: mod_base = OTHER; note = 2'-O-methyluridine-3'-phosphorothioate
  modified_base 6: mod_base = OTHER; note = 2'-deoxythymidine-3'-phosphorothioate
  modified_base 7: mod_base = OTHER; note = 2'-deoxythymidine-3'-phosphorothioate
  modified_base 8: mod_base = OTHER; note = 5'-methyl-deoxycytidine-3'-phosphorothioate
  modified_base 9: mod_base = OTHER; note = 2'-deoxyadenosine-3'-phosphorothioate
  modified_base 10: mod_base = OTHER; note = 2'-deoxythymidine-3'-phosphorothioate
  modified_base 11: mod_base = OTHER; note = 5'-methyl-deoxycytidine-3'-phosphorothioate
  modified_base 12: mod_base = OTHER; note = 5'-methyl-deoxycytidine-3'-phosphorothioate
  modified_base 13: mod_base = OTHER; note = 2'-deoxyadenosine-3'-phosphorothioate
  modified_base 14: mod_base = OTHER; note = 5'-methyl-deoxycytidine-3'-phosphorothioate
  modified_base 15: mod_base = OTHER; note = 2'-deoxyadenosine-3'-phosphorothioate
  modified_base 16: mod_base = OTHER; note = 2'-O-methylguanosine-3'- phosphorothioate
  modified_base 17: mod_base = OTHER; note = 2'-O-methylguanosine-3'- phosphorothioate
  modified_base 18: mod_base = OTHER; note = 2'-O-methylguanosine-3'- phosphorothioate
  modified_base 19: mod_base = OTHER; note = 2'-O-methylguanosine-3'- phosphorothioate
  modified_base 20: mod_base = OTHER; note = 2'-O-methyladenosine-3'-phosphate
  misc_feature 1..5: note = RNA
  misc_feature 6..15: note = DNA
  misc_feature 16..20: note = RNA
gccttttcatccacagggga

SEQ ID NO: 76 - DNA, 20 bp, synthetic construct
  source 1..20: mol_type = other DNA; note = Description of Artificial Sequence: Synthetic oligonucleotide; note = Description of Combined DNA/RNA Molecule: Synthetic oligonucleotide
  modified_base 1: mod_base = OTHER; note = 2'-O-methylcytidine-3'- phosphorothioate
  modified_base 2: mod_base = OTHER; note = 2'-O-methyluridine-3'-phosphorothioate
  modified_base 3: mod_base = OTHER; note = 2'-O-methylguanosine-3'- phosphorothioate
  modified_base 4: mod_base = OTHER; note = 2'-O-methylguanosine-3'- phosphorothioate
  modified_base 5: mod_base = OTHER; note = 2'-O-methyluridine-3'-phosphorothioate
  modified_base 6: mod_base = OTHER; note = 5'-methyl-deoxycytidine-3'-phosphorothioate
  modified_base 7: mod_base = OTHER; note = 5'-methyl-deoxycytidine-3'-phosphorothioate
  modified_base 8: mod_base = OTHER; note = 2'-deoxythymidine-3'-phosphorothioate
  modified_base 9: mod_base = OTHER; note = 2'-deoxyguanosine-3'-phosphorothioate
  modified_base 10: mod_base = OTHER; note = 2'-deoxythymidine-3'-phosphorothioate
  modified_base 11: mod_base = OTHER; note = 2'-deoxyadenosine-3'-phosphorothioate
  modified_base 12: mod_base = OTHER; note = 2'-deoxyguanosine-3'-phosphorothioate
  modified_base 13: mod_base = OTHER; note = 2'-deoxyguanosine-3'-phosphorothioate
  modified_base 14: mod_base = OTHER; note = 2'-deoxyguanosine-3'-phosphorothioate
  modified_base 15: mod_base = OTHER; note = 5'-methyl-deoxycytidine-3'-phosphorothioate
  modified_base 16: mod_base = OTHER; note = 2'-O-methylcytidine-3'- phosphorothioate
  modified_base 17: mod_base = OTHER; note = 2'-O-methyluridine-3'-phosphorothioate
  modified_base 18: mod_base = OTHER; note = 2'-O-methyluridine-3'-phosphorothioate
  modified_base 19: mod_base = OTHER; note = 2'-O-methyluridine-3'-phosphorothioate
  modified_base 20: mod_base = OTHER; note = 2'-O-methyluridine-3'-phosphate
  misc_feature 1..5: note = RNA
  misc_feature 6..15: note = DNA
  misc_feature 16..20: note = RNA
ctggtcctgtagggcctttt

SEQ ID NO: 77 - DNA, 20 bp, synthetic construct
  source 1..20: mol_type = other DNA; note = Description of Artificial Sequence: Synthetic oligonucleotide; note = Description of Combined DNA/RNA Molecule: Synthetic oligonucleotide
  modified_base 1: mod_base = OTHER; note = 2'-O-methyluridine-3'-phosphorothioate
  modified_base 2: mod_base = OTHER; note = 2'-O-methyladenosine-3'- phosphorothioate
  modified_base 3: mod_base = OTHER; note = 2'-O-methylguanosine-3'- phosphorothioate
  modified_base 4: mod_base = OTHER; note = 2'-O-methylcytidine-3'- phosphorothioate
  modified_base 5: mod_base = OTHER; note = 2'-O-methyladenosine-3'- phosphorothioate
  modified_base 6: mod_base = OTHER; note = 5'-methyl-deoxycytidine-3'-phosphorothioate
  modified_base 7: mod_base = OTHER; note = 5'-methyl-deoxycytidine-3'-phosphorothioate
  modified_base 8: mod_base = OTHER; note = 2'-deoxyadenosine-3'-phosphorothioate
  modified_base 9: mod_base = OTHER; note = 2'-deoxyguanosine-3'-phosphorothioate
  modified_base 10: mod_base = OTHER; note = 5'-methyl-deoxycytidine-3'-phosphorothioate
  modified_base 11: mod_base = OTHER; note = 2'-deoxythymidine-3'-phosphorothioate
  modified_base 12: mod_base = OTHER; note = 2'-deoxyguanosine-3'-phosphorothioate
  modified_base 13: mod_base = OTHER; note = 2'-deoxyguanosine-3'-phosphorothioate
  modified_base 14: mod_base = OTHER; note = 2'-deoxythymidine-3'-phosphorothioate
  modified_base 15: mod_base = OTHER; note = 5'-methyl-deoxycytidine-3'-phosphorothioate
  modified_base 16: mod_base = OTHER; note = 2'-O-methylcytidine-3'- phosphorothioate
  modified_base 17: mod_base = OTHER; note = 2'-O-methyluridine-3'-phosphorothioate
  modified_base 18: mod_base = OTHER; note = 2'-O-methylguanosine-3'- phosphorothioate
  modified_base 19: mod_base = OTHER; note = 2'-O-methyluridine-3'-phosphorothioate
  modified_base 20: mod_base = OTHER; note = 2'-O-methyladenosine-3'-phosphate
  misc_feature 1..5: note = RNA
  misc_feature 6..15: note = DNA
  misc_feature 16..20: note = RNA
tagcaccagctggtcctgta

SEQ ID NO: 78 - DNA, 20 bp, synthetic construct
  source 1..20: mol_type = other DNA; note = Description of Artificial Sequence: Synthetic oligonucleotide; note = Description of Combined DNA/RNA Molecule: Synthetic oligonucleotide
  modified_base 1: mod_base = OTHER; note = 2'-O-methyluridine-3'-phosphorothioate
  modified_base 2: mod_base = OTHER; note = 2'-O-methyluridine-3'-phosphorothioate
  modified_base 3: mod_base = OTHER; note = 2'-O-methyluridine-3'-phosphorothioate
  modified_base 4: mod_base = OTHER; note = 2'-O-methylguanosine-3'- phosphorothioate
  modified_base 5: mod_base = OTHER; note = 2'-O-methylcytidine-3'- phosphorothioate
  modified_base 6: mod_base = OTHER; note = 2'-deoxyadenosine-3'-phosphorothioate
  modified_base 7: mod_base = OTHER; note = 2'-deoxyguanosine-3'-phosphorothioate
  modified_base 8: mod_base = OTHER; note = 5'-methyl-deoxycytidine-3'-phosphorothioate
  modified_base 9: mod_base = OTHER; note = 2'-deoxyguanosine-3'-phosphorothioate
  modified_base 10: mod_base = OTHER; note = 2'-deoxyadenosine-3'-phosphorothioate
  modified_base 11: mod_base = OTHER; note = 5'-methyl-deoxycytidine-3'-phosphorothioate
  modified_base 12: mod_base = OTHER; note = 2'-deoxythymidine-3'-phosphorothioate
  modified_base 13: mod_base = OTHER; note = 2'-deoxyadenosine-3'-phosphorothioate
  modified_base 14: mod_base = OTHER; note = 2'-deoxyguanosine-3'-phosphorothioate
  modified_base 15: mod_base = OTHER; note = 5'-methyl-deoxycytidine-3'-phosphorothioate
  modified_base 16: mod_base = OTHER; note = 2'-O-methyladenosine-3'- phosphorothioate
  modified_base 17: mod_base = OTHER; note = 2'-O-methylcytidine-3'- phosphorothioate
  modified_base 18: mod_base = OTHER; note = 2'-O-methylcytidine-3'- phosphorothioate
  modified_base 19: mod_base = OTHER; note = 2'-O-methyladenosine-3'- phosphorothioate
  modified_base 20: mod_base = OTHER; note = 2'-O-methylguanosine-3'-phosphate
  misc_feature 1..5: note = RNA
  misc_feature 6..15: note = DNA
  misc_feature 16..20: note = RNA
tttgcagcgactagcaccag

SEQ ID NO: 79 - DNA, 20 bp, synthetic construct
  source 1..20: mol_type = other DNA; note = Description of Artificial Sequence: Synthetic oligonucleotide; note = Description of Combined DNA/RNA Molecule: Synthetic oligonucleotide
  modified_base 1: mod_base = OTHER; note = 2'-O-methyluridine-3'-phosphorothioate
  modified_base 2: mod_base = OTHER; note = 2'-O-methylcytidine-3'- phosphorothioate
  modified_base 3: mod_base = OTHER; note = 2'-O-methylguanosine-3'- phosphorothioate
  modified_base 4: mod_base = OTHER; note = 2'-O-methylguanosine-3'- phosphorothioate
  modified_base 5: mod_base = OTHER; note = 2'-O-methyluridine-3'-phosphorothioate
  modified_base 6: mod_base = OTHER; note = 2'-deoxyguanosine-3'-phosphorothioate
  modified_base 7: mod_base = OTHER; note = 2'-deoxythymidine-3'-phosphorothioate
  modified_base 8: mod_base = OTHER; note = 5'-methyl-deoxycytidine-3'-phosphorothioate
  modified_base 9: mod_base = OTHER; note = 2'-deoxyadenosine-3'-phosphorothioate
  modified_base 10: mod_base = OTHER; note = 2'-deoxyadenosine-3'-phosphorothioate
  modified_base 11: mod_base = OTHER; note = 2'-deoxyguanosine-3'-phosphorothioate
  modified_base 12: mod_base = OTHER; note = 2'-deoxythymidine-3'-phosphorothioate
  modified_base 13: mod_base = OTHER; note = 2'-deoxythymidine-3'-phosphorothioate
  modified_base 14: mod_base = OTHER; note = 2'-deoxythymidine-3'-phosphorothioate
  modified_base 15: mod_base = OTHER; note = 2'-deoxythymidine-3'-phosphorothioate
  modified_base 16: mod_base = OTHER; note = 2'-O-methylguanosine-3'- phosphorothioate
  modified_base 17: mod_base = OTHER; note = 2'-O-methylcytidine-3'- phosphorothioate
  modified_base 18: mod_base = OTHER; note = 2'-O-methyladenosine-3'- phosphorothioate
  modified_base 19: mod_base = OTHER; note = 2'-O-methylguanosine-3'- phosphorothioate
  modified_base 20: mod_base = OTHER; note = 2'-O-methylcytidine-3'-phosphate
  misc_feature 1..5: note = RNA
  misc_feature 6..15: note = DNA
  misc_feature 16..20: note = RNA
tcggtgtcaagttttgcagc

SEQ ID NO: 80 - DNA, 20 bp, synthetic construct
  source 1..20: mol_type = other DNA; note = Description of Artificial Sequence: Synthetic oligonucleotide; note = Description of Combined DNA/RNA Molecule: Synthetic oligonucleotide
  modified_base 1: mod_base = OTHER; note = 2'-O-methylcytidine-3'- phosphorothioate
  modified_base 2: mod_base = OTHER; note = 2'-O-methyladenosine-3'- phosphorothioate
  modified_base 3: mod_base = OTHER; note = 2'-O-methyladenosine-3'- phosphorothioate
  modified_base 4: mod_base = OTHER; note = 2'-O-methylcytidine-3'- phosphorothioate
  modified_base 5: mod_base = OTHER; note = 2'-O-methyluridine-3'-phosphorothioate
  modified_base 6: mod_base = OTHER; note = 2'-deoxythymidine-3'-phosphorothioate
  modified_base 7: mod_base = OTHER; note = 2'-deoxyguanosine-3'-phosphorothioate
  modified_base 8: mod_base = OTHER; note = 2'-deoxythymidine-3'-phosphorothioate
  modified_base 9: mod_base = OTHER; note = 5'-methyl-deoxycytidine-3'-phosphorothioate
  modified_base 10: mod_base = OTHER; note = 2'-deoxythymidine-3'-phosphorothioate
  modified_base 11: mod_base = OTHER; note = 2'-deoxythymidine-3'-phosphorothioate
  modified_base 12: mod_base = OTHER; note = 5'-methyl-deoxycytidine-3'-phosphorothioate
  modified_base 13: mod_base = OTHER; note = 2'-deoxyguanosine-3'-phosphorothioate
  modified_base 14: mod_base = OTHER; note = 2'-deoxyguanosine-3'-phosphorothioate
  modified_base 15: mod_base = OTHER; note = 2'-deoxythymidine-3'-phosphorothioate
  modified_base 16: mod_base = OTHER; note = 2'-O-methylguanosine-3'- phosphorothioate
  modified_base 17: mod_base = OTHER; note = 2'-O-methyluridine-3'-phosphorothioate
  modified_base 18: mod_base = OTHER; note = 2'-O-methylcytidine-3'- phosphorothioate
  modified_base 19: mod_base = OTHER; note = 2'-O-methyladenosine-3'- phosphorothioate
  modified_base 20: mod_base = OTHER; note = 2'-O-methyladenosine-3'-phosphate
  misc_feature 1..5: note = RNA
  misc_feature 6..15: note = DNA
  misc_feature 16..20: note = RNA
caacttgtcttcggtgtcaa

SEQ ID NO: 81 - DNA, 20 bp, synthetic construct
  source 1..20: mol_type = other DNA; note = Description of Artificial Sequence: Synthetic oligonucleotide; note = Description of Combined DNA/RNA Molecule: Synthetic oligonucleotide
  modified_base 1: mod_base = OTHER; note = 2'-O-methylcytidine-3'- phosphorothioate
  modified_base 2: mod_base = OTHER; note = 2'-O-methyladenosine-3'- phosphorothioate
  modified_base 3: mod_base = OTHER; note = 2'-O-methyluridine-3'-phosphorothioate
  modified_base 4: mod_base = OTHER; note = 2'-O-methyluridine-3'-phosphorothioate
  modified_base 5: mod_base = OTHER; note = 2'-O-methylguanosine-3'- phosphorothioate
  modified_base 6: mod_base = OTHER; note = 5'-methyl-deoxycytidine-3'-phosphorothioate
  modified_base 7: mod_base = OTHER; note = 2'-deoxyguanosine-3'-phosphorothioate
  modified_base 8: mod_base = OTHER; note = 2'-deoxyguanosine-3'-phosphorothioate
  modified_base 9: mod_base = OTHER; note = 5'-methyl-deoxycytidine-3'-phosphorothioate
  modified_base 10: mod_base = OTHER; note = 5'-methyl-deoxycytidine-3'-phosphorothioate
  modified_base 11: mod_base = OTHER; note = 5'-methyl-deoxycytidine-3'-phosphorothioate
  modified_base 12: mod_base = OTHER; note = 2'-deoxythymidine-3'-phosphorothioate
  modified_base 13: mod_base = OTHER; note = 5'-methyl-deoxycytidine-3'-phosphorothioate
  modified_base 14: mod_base = OTHER; note = 2'-deoxyadenosine-3'-phosphorothioate
  modified_base 15: mod_base = OTHER; note = 2'-deoxyadenosine-3'-phosphorothioate
  modified_base 16: mod_base = OTHER; note = 2'-O-methylcytidine-3'- phosphorothioate
  modified_base 17: mod_base = OTHER; note = 2'-O-methyluridine-3'-phosphorothioate
  modified_base 18: mod_base = OTHER; note = 2'-O-methyluridine-3'-phosphorothioate
  modified_base 19: mod_base = OTHER; note = 2'-O-methylguanosine-3'- phosphorothioate
  modified_base 20: mod_base = OTHER; note = 2'-O-methyluridine-3'-phosphate
  misc_feature 1..5: note = RNA
  misc_feature 6..15: note = DNA
  misc_feature 16..20: note = RNA
cattgcggccctcaacttgt

SEQ ID NO: 82 - DNA, 20 bp, synthetic construct
  source 1..20: mol_type = other DNA; note = Description of Artificial Sequence: Synthetic oligonucleotide; note = Description of Combined DNA/RNA Molecule: Synthetic oligonucleotide
  modified_base 1: mod_base = OTHER; note = 2'-O-methyladenosine-3'- phosphorothioate
  modified_base 2: mod_base = OTHER; note = 2'-O-methylguanosine-3'- phosphorothioate
  modified_base 3: mod_base = OTHER; note = 2'-O-methylcytidine-3'- phosphorothioate
  modified_base 4: mod_base = OTHER; note = 2'-O-methyladenosine-3'- phosphorothioate
  modified_base 5: mod_base = OTHER; note = 2'-O-methyluridine-3'-phosphorothioate
  modified_base 6: mod_base = OTHER; note = 5'-methyl-deoxycytidine-3'-phosphorothioate
  modified_base 7: mod_base = OTHER; note = 5'-methyl-deoxycytidine-3'-phosphorothioate
  modified_base 8: mod_base = OTHER; note = 5'-methyl-deoxycytidine-3'-phosphorothioate
  modified_base 9: mod_base = OTHER; note = 2'-deoxyguanosine-3'-phosphorothioate
  modified_base 10: mod_base = OTHER; note = 2'-deoxyadenosine-3'-phosphorothioate
  modified_base 11: mod_base = OTHER; note = 5'-methyl-deoxycytidine-3'-phosphorothioate
  modified_base 12: mod_base = OTHER; note = 5'-methyl-deoxycytidine-3'-phosphorothioate
  modified_base 13: mod_base = OTHER; note = 2'-deoxyadenosine-3'-phosphorothioate
  modified_base 14: mod_base = OTHER; note = 2'-deoxythymidine-3'-phosphorothioate
  modified_base 15: mod_base = OTHER; note = 2'-deoxythymidine-3'-phosphorothioate
  modified_base 16: mod_base = OTHER; note = 2'-O-methylguanosine-3'- phosphorothioate
  modified_base 17: mod_base = OTHER; note = 2'-O-methylcytidine-3'- phosphorothioate
  modified_base 18: mod_base = OTHER; note = 2'-O-methylguanosine-3'- phosphorothioate
  modified_base 19: mod_base = OTHER; note = 2'-O-methylguanosine-3'- phosphorothioate
  modified_base 20: mod_base = OTHER; note = 2'-O-methylcytidine-3'-phosphate
  misc_feature 1..5: note = RNA
  misc_feature 6..15: note = DNA
  misc_feature 16..20: note = RNA
agcatcccgaccattgcggc

SEQ ID NO: 83 - DNA, 20 bp, synthetic construct
  source 1..20: mol_type = other DNA; note = Description of Artificial Sequence: Synthetic oligonucleotide; note = Description of Combined DNA/RNA Molecule: Synthetic oligonucleotide
  modified_base 1: mod_base = OTHER; note = 2'-O-methyladenosine-3'- phosphorothioate
  modified_base 2: mod_base = OTHER; note = 2'-O-methylguanosine-3'- phosphorothioate
  modified_base 3: mod_base = OTHER; note = 2'-O-methyladenosine-3'- phosphorothioate
  modified_base 4: mod_base = OTHER; note = 2'-O-methyladenosine-3'- phosphorothioate
  modified_base 5: mod_base = OTHER; note = 2'-O-methylguanosine-3'- phosphorothioate
  modified_base 6: mod_base = OTHER; note = 2'-deoxythymidine-3'-phosphorothioate
  modified_base 7: mod_base = OTHER; note = 2'-deoxythymidine-3'-phosphorothioate
  modified_base 8: mod_base = OTHER; note = 2'-deoxyguanosine-3'-phosphorothioate
  modified_base 9: mod_base = OTHER; note = 2'-deoxyguanosine-3'-phosphorothioate
  modified_base 10: mod_base = OTHER; note = 5'-methyl-deoxycytidine-3'-phosphorothioate
  modified_base 11: mod_base = OTHER; note = 5'-methyl-deoxycytidine-3'-phosphorothioate
  modified_base 12: mod_base = OTHER; note = 2'-deoxyadenosine-3'-phosphorothioate
  modified_base 13: mod_base = OTHER; note = 2'-deoxyguanosine-3'-phosphorothioate
  modified_base 14: mod_base = OTHER; note = 5'-methyl-deoxycytidine-3'-phosphorothioate
  modified_base 15: mod_base = OTHER; note = 2'-deoxyadenosine-3'-phosphorothioate
  modified_base 16: mod_base = OTHER; note = 2'-O-methyluridine-3'-phosphorothioate
  modified_base 17: mod_base = OTHER; note = 2'-O-methylcytidine-3'- phosphorothioate
  modified_base 18: mod_base = OTHER; note = 2'-O-methylcytidine-3'- phosphorothioate
  modified_base 19: mod_base = OTHER; note = 2'-O-methylcytidine-3'- phosphorothioate
  modified_base 20: mod_base = OTHER; note = 2'-O-methylguanosine-3'-phosphate
  misc_feature 1..5: note = RNA
  misc_feature 6..15: note = DNA
  misc_feature 16..20: note = RNA
agaagttggccagcatcccg

SEQ ID NO: 84 - DNA, 20 bp, synthetic construct
  source 1..20: mol_type = other DNA; note = Description of Artificial Sequence: Synthetic oligonucleotide; note = Description of Combined DNA/RNA Molecule: Synthetic oligonucleotide
  modified_base 1: mod_base = OTHER; note = 2'-O-methyluridine-3'-phosphorothioate
  modified_base 2: mod_base = OTHER; note = 2'-O-methyladenosine-3'- phosphorothioate
  modified_base 3: mod_base = OTHER; note = 2'-O-methylcytidine-3'- phosphorothioate
  modified_base 4: mod_base = OTHER; note = 2'-O-methylguanosine-3'- phosphorothioate
  modified_base 5: mod_base = OTHER; note = 2'-O-methylguanosine-3'- phosphorothioate
  modified_base 6: mod_base = OTHER; note = 2'-deoxyadenosine-3'-phosphorothioate
  modified_base 7: mod_base = OTHER; note = 2'-deoxyadenosine-3'-phosphorothioate
  modified_base 8: mod_base = OTHER; note = 2'-deoxyguanosine-3'-phosphorothioate
  modified_base 9: mod_base = OTHER; note = 5'-methyl-deoxycytidine-3'-phosphorothioate
  modified_base 10: mod_base = OTHER; note = 5'-methyl-deoxycytidine-3'-phosphorothioate
  modified_base 11: mod_base = OTHER; note = 5'-methyl-deoxycytidine-3'-phosphorothioate
  modified_base 12: mod_base = OTHER; note = 2'-deoxyadenosine-3'-phosphorothioate
  modified_base 13: mod_base = OTHER; note = 2'-deoxyadenosine-3'-phosphorothioate
  modified_base 14: mod_base = OTHER; note = 2'-deoxyguanosine-3'-phosphorothioate
  modified_base 15: mod_base = OTHER; note = 2'-deoxyadenosine-3'-phosphorothioate
  modified_base 16: mod_base = OTHER; note = 2'-O-methyladenosine-3'- phosphorothioate
  modified_base 17: mod_base = OTHER; note = 2'-O-methylguanosine-3'- phosphorothioate
  modified_base 18: mod_base = OTHER; note = 2'-O-methyluridine-3'-phosphorothioate
  modified_base 19: mod_base = OTHER; note = 2'-O-methyluridine-3'-phosphorothioate
  modified_base 20: mod_base = OTHER; note = 2'-O-methylguanosine-3'-phosphate
  misc_feature 1..5: note = RNA
  misc_feature 6..15: note = DNA
  misc_feature 16..20: note = RNA
tacggaagcccaagaagttg

SEQ ID NO: 85 - DNA, 20 bp, synthetic construct
  source 1..20: mol_type = other DNA; note = Description of Artificial Sequence: Synthetic oligonucleotide; note = Description of Combined DNA/RNA Molecule: Synthetic oligonucleotide
  modified_base 1: mod_base = OTHER; note = 2'-O-methyladenosine-3'- phosphorothioate
  modified_base 2: mod_base = OTHER; note = 2'-O-methyluridine-3'-phosphorothioate
  modified_base 3: mod_base = OTHER; note = 2'-O-methylguanosine-3'- phosphorothioate
  modified_base 4: mod_base = OTHER; note = 2'-O-methylcytidine-3'- phosphorothioate
  modified_base 5: mod_base = OTHER; note = 2'-O-methylcytidine-3'- phosphorothioate
  modified_base 6: mod_base = OTHER; note = 2'-deoxyadenosine-3'-phosphorothioate
  modified_base 7: mod_base = OTHER; note = 2'-deoxythymidine-3'-phosphorothioate
  modified_base 8: mod_base = OTHER; note = 2'-deoxyadenosine-3'-phosphorothioate
  modified_base 9: mod_base = OTHER; note = 2'-deoxythymidine-3'-phosphorothioate
  modified_base 10: mod_base = OTHER; note = 2'-deoxyadenosine-3'-phosphorothioate
  modified_base 11: mod_base = OTHER; note = 2'-deoxythymidine-3'-phosphorothioate
  modified_base 12: mod_base = OTHER; note = 2'-deoxyadenosine-3'-phosphorothioate
  modified_base 13: mod_base = OTHER; note = 5'-methyl-deoxycytidine-3'-phosphorothioate
  modified_base 14: mod_base = OTHER; note = 2'-deoxyguanosine-3'-phosphorothioate
  modified_base 15: mod_base = OTHER; note = 2'-deoxyguanosine-3'-phosphorothioate
  modified_base 16: mod_base = OTHER; note = 2'-O-methyladenosine-3'- phosphorothioate
  modified_base 17: mod_base = OTHER; note = 2'-O-methyladenosine-3'- phosphorothioate
  modified_base 18: mod_base = OTHER; note = 2'-O-methylguanosine-3'- phosphorothioate
  modified_base 19: mod_base = OTHER; note = 2'-O-methylcytidine-3'- phosphorothioate
  modified_base 20: mod_base = OTHER; note = 2'-O-methylcytidine-3'-phosphate
  misc_feature 1..5: note = RNA
  misc_feature 6..15: note = DNA
  misc_feature 16..20: note = RNA
atgccatatatacggaagcc

SEQ ID NO: 86 - DNA, 20 bp, synthetic construct
  source 1..20: mol_type = other DNA; note = Description of Artificial Sequence: Synthetic oligonucleotide; note = Description of Combined DNA/RNA Molecule: Synthetic oligonucleotide
  modified_base 1: mod_base = OTHER; note = 2'-O-methyladenosine-3'- phosphorothioate
  modified_base 2: mod_base = OTHER; note = 2'-O-methylguanosine-3'- phosphorothioate
  modified_base 3: mod_base = OTHER; note = 2'-O-methylcytidine-3'- phosphorothioate
  modified_base 4: mod_base = OTHER; note = 2'-O-methyluridine-3'-phosphorothioate
  modified_base 5: mod_base = OTHER; note = 2'-O-methylcytidine-3'- phosphorothioate
  modified_base 6: mod_base = OTHER; note = 2'-deoxyadenosine-3'-phosphorothioate
  modified_base 7: mod_base = OTHER; note = 5'-methyl-deoxycytidine-3'-phosphorothioate
  modified_base 8: mod_base = OTHER; note = 2'-deoxythymidine-3'-phosphorothioate
  modified_base 9: mod_base = OTHER; note = 2'-deoxyguanosine-3'-phosphorothioate
  modified_base 10: mod_base = OTHER; note = 2'-deoxythymidine-3'-phosphorothioate
  modified_base 11: mod_base = OTHER; note = 2'-deoxyguanosine-3'-phosphorothioate
  modified_base 12: mod_base = OTHER; note = 5'-methyl-deoxycytidine-3'-phosphorothioate
  modified_base 13: mod_base = OTHER; note = 2'-deoxyadenosine-3'-phosphorothioate
  modified_base 14: mod_base = OTHER; note = 2'-deoxythymidine-3'-phosphorothioate
  modified_base 15: mod_base = OTHER; note = 2'-deoxyguanosine-3'-phosphorothioate
  modified_base 16: mod_base = OTHER; note = 2'-O-methylcytidine-3'- phosphorothioate
  modified_base 17: mod_base = OTHER; note = 2'-O-methylcytidine-3'- phosphorothioate
  modified_base 18: mod_base = OTHER; note = 2'-O-methyladenosine-3'- phosphorothioate
  modified_base 19: mod_base = OTHER; note = 2'-O-methyluridine-3'-phosphorothioate
  modified_base 20: mod_base = OTHER; note = 2'-O-methyladenosine-3'-phosphate
  misc_feature 1..5: note = RNA
  misc_feature 6..15: note = DNA
  misc_feature 16..20: note = RNA
agctcactgtgcatgccata

SEQ ID NO: 87 - DNA, 20 bp, synthetic construct
  source 1..20: mol_type = other DNA; note = Description of Artificial Sequence: Synthetic oligonucleotide; note = Description of Combined DNA/RNA Molecule: Synthetic oligonucleotide
  modified_base 1: mod_base = OTHER; note = 2'-O-methylcytidine-3'- phosphorothioate
  modified_base 2: mod_base = OTHER; note = 2'-O-methyladenosine-3'- phosphorothioate
  modified_base 3: mod_base = OTHER; note = 2'-O-methylcytidine-3'- phosphorothioate
  modified_base 4: mod_base = OTHER; note = 2'-O-methylguanosine-3'- phosphorothioate
  modified_base 5: mod_base = OTHER; note = 2'-O-methylcytidine-3'- phosphorothioate
  modified_base 6: mod_base = OTHER; note = 5'-methyl-deoxycytidine-3'-phosphorothioate
  modified_base 7: mod_base = OTHER; note = 5'-methyl-deoxycytidine-3'-phosphorothioate
  modified_base 8: mod_base = OTHER; note = 5'-methyl-deoxycytidine-3'-phosphorothioate
  modified_base 9: mod_base = OTHER; note = 2'-deoxyadenosine-3'-phosphorothioate
  modified_base 10: mod_base = OTHER; note = 2'-deoxythymidine-3'-phosphorothioate
  modified_base 11: mod_base = OTHER; note = 2'-deoxyadenosine-3'-phosphorothioate
  modified_base 12: mod_base = OTHER; note = 2'-deoxyguanosine-3'-phosphorothioate
  modified_base 13: mod_base = OTHER; note = 5'-methyl-deoxycytidine-3'-phosphorothioate
  modified_base 14: mod_base = OTHER; note = 2'-deoxythymidine-3'-phosphorothioate
  modified_base 15: mod_base = OTHER; note = 5'-methyl-deoxycytidine-3'-phosphorothioate
  modified_base 16: mod_base = OTHER; note = 2'-O-methyladenosine-3'- phosphorothioate
  modified_base 17: mod_base = OTHER; note = 2'-O-methylcytidine-3'- phosphorothioate
  modified_base 18: mod_base = OTHER; note = 2'-O-methyluridine-3'-phosphorothioate
  modified_base 19: mod_base = OTHER; note = 2'-O-methylguanosine-3'- phosphorothioate
  modified_base 20: mod_base = OTHER; note = 2'-O-methyluridine-3'-phosphate
  misc_feature 1..5: note = RNA
  misc_feature 6..15: note = DNA
  misc_feature 16..20: note = RNA
cacgccccatagctcactgt

SEQ ID NO: 88 - DNA, 20 bp, synthetic construct
  source 1..20: mol_type = other DNA; note = Description of Artificial Sequence: Synthetic oligonucleotide; note = Description of Combined DNA/RNA Molecule: Synthetic oligonucleotide
  modified_base 1: mod_base = OTHER; note = 2'-O-methylguanosine-3'- phosphorothioate
  modified_base 2: mod_base = OTHER; note = 2'-O-methylcytidine-3'- phosphorothioate
  modified_base 3: mod_base = OTHER; note = 2'-O-methylcytidine-3'- phosphorothioate
  modified_base 4: mod_base = OTHER; note = 2'-O-methylcytidine-3'- phosphorothioate
  modified_base 5: mod_base = OTHER; note = 2'-O-methylcytidine-3'- phosphorothioate
  modified_base 6: mod_base = OTHER; note = 2'-deoxyadenosine-3'-phosphorothioate
  modified_base 7: mod_base = OTHER; note = 2'-deoxythymidine-3'-phosphorothioate
  modified_base 8: mod_base = OTHER; note = 2'-deoxyguanosine-3'-phosphorothioate
  modified_base 9: mod_base = OTHER; note = 2'-deoxyguanosine-3'-phosphorothioate
  modified_base 10: mod_base = OTHER; note = 2'-deoxyadenosine-3'-phosphorothioate
  modified_base 11: mod_base = OTHER; note = 5'-methyl-deoxycytidine-3'-phosphorothioate
  modified_base 12: mod_base = OTHER; note = 5'-methyl-deoxycytidine-3'-phosphorothioate
  modified_base 13: mod_base = OTHER; note = 2'-deoxyadenosine-3'-phosphorothioate
  modified_base 14: mod_base = OTHER; note = 5'-methyl-deoxycytidine-3'-phosphorothioate
  modified_base 15: mod_base = OTHER; note = 2'-deoxyguanosine-3'-phosphorothioate
  modified_base 16: mod_base = OTHER; note = 2'-O-methylcytidine-3'- phosphorothioate
  modified_base 17: mod_base = OTHER; note = 2'-O-methylcytidine-3'- phosphorothioate
  modified_base 18: mod_base = OTHER; note = 2'-O-methylcytidine-3'- phosphorothioate
  modified_base 19: mod_base = OTHER; note = 2'-O-methylcytidine-3'- phosphorothioate
  modified_base 20: mod_base = OTHER; note = 2'-O-methyladenosine-3'-phosphate
  misc_feature 1..5: note = RNA
  misc_feature 6..15: note = DNA
  misc_feature 16..20: note = RNA
gccccatggaccacgcccca

SEQ ID NO: 89 - DNA, 20 bp, synthetic construct
  source 1..20: mol_type = other DNA; note = Description of Artificial Sequence: Synthetic oligonucleotide; note = Description of Combined DNA/RNA Molecule: Synthetic oligonucleotide
  modified_base 1: mod_base = OTHER; note = 2'-O-methylguanosine-3'- phosphorothioate
  modified_base 2: mod_base = OTHER; note = 2'-O-methyladenosine-3'- phosphorothioate
  modified_base 3: mod_base = OTHER; note = 2'-O-methylguanosine-3'- phosphorothioate
  modified_base 4: mod_base = OTHER; note = 2'-O-methylguanosine-3'- phosphorothioate
  modified_base 5: mod_base = OTHER; note = 2'-O-methyladenosine-3'- phosphorothioate
  modified_base 6: mod_base = OTHER; note = 5'-methyl-deoxycytidine-3'-phosphorothioate
  modified_base 7: mod_base = OTHER; note = 2'-deoxyguanosine-3'-phosphorothioate
  modified_base 8: mod_base = OTHER; note = 2'-deoxyguanosine-3'-phosphorothioate
  modified_base 9: mod_base = OTHER; note = 2'-deoxythymidine-3'-phosphorothioate
  modified_base 10: mod_base = OTHER; note = 2'-deoxyguanosine-3'-phosphorothioate
  modified_base 11: mod_base = OTHER; note = 2'-deoxyguanosine-3'-phosphorothioate
  modified_base 12: mod_base = OTHER; note = 5'-methyl-deoxycytidine-3'-phosphorothioate
  modified_base 13: mod_base = OTHER; note = 5'-methyl-deoxycytidine-3'-phosphorothioate
  modified_base 14: mod_base = OTHER; note = 5'-methyl-deoxycytidine-3'-phosphorothioate
  modified_base 15: mod_base = OTHER; note = 5'-methyl-deoxycytidine-3'-phosphorothioate
  modified_base 16: mod_base = OTHER; note = 2'-O-methyladenosine-3'- phosphorothioate
  modified_base 17: mod_base = OTHER; note = 2'-O-methyluridine-3'-phosphorothioate
  modified_base 18: mod_base = OTHER; note = 2'-O-methylguanosine-3'- phosphorothioate
  modified_base 19: mod_base = OTHER; note = 2'-O-methylguanosine-3'- phosphorothioate
  modified_base 20: mod_base = OTHER; note = 2'-O-methyladenosine-3'-phosphate
  misc_feature 1..5: note = RNA
  misc_feature 6..15: note = DNA
  misc_feature 16..20: note = RNA
gaggacggtggccccatgga

SEQ ID NO: 90 - DNA, 20 bp, synthetic construct
  source 1..20: mol_type = other DNA; note = Description of Artificial Sequence: Synthetic oligonucleotide; note = Description of Combined DNA/RNA Molecule: Synthetic oligonucleotide
  modified_base 1: mod_base = OTHER; note = 2'-O-methylcytidine-3'- phosphorothioate
  modified_base 2: mod_base = OTHER; note = 2'-O-methyladenosine-3'- phosphorothioate
  modified_base 3: mod_base = OTHER; note = 2'-O-methylguanosine-3'- phosphorothioate
  modified_base 4: mod_base = OTHER; note = 2'-O-methylcytidine-3'- phosphorothioate
  modified_base 5: mod_base = OTHER; note = 2'-O-methylcytidine-3'- phosphorothioate
  modified_base 6: mod_base = OTHER; note = 2'-deoxyguanosine-3'-phosphorothioate
  modified_base 7: mod_base = OTHER; note = 2'-deoxythymidine-3'-phosphorothioate
  modified_base 8: mod_base = OTHER; note = 2'-deoxythymidine-3'-phosphorothioate
  modified_base 9: mod_base = OTHER; note = 2'-deoxyguanosine-3'-phosphorothioate
  modified_base 10: mod_base = OTHER; note = 2'-deoxyguanosine-3'-phosphorothioate
  modified_base 11: mod_base = OTHER; note = 2'-deoxyguanosine-3'-phosphorothioate
  modified_base 12: mod_base = OTHER; note = 2'-deoxyguanosine-3'-phosphorothioate
  modified_base 13: mod_base = OTHER; note = 2'-deoxyadenosine-3'-phosphorothioate
  modified_base 14: mod_base = OTHER; note = 2'-deoxyguanosine-3'-phosphorothioate
  modified_base 15: mod_base = OTHER; note = 2'-deoxyadenosine-3'-phosphorothioate
  modified_base 16: mod_base = OTHER; note = 2'-O-methylguanosine-3'- phosphorothioate
  modified_base 17: mod_base = OTHER; note = 2'-O-methylguanosine-3'- phosphorothioate
  modified_base 18: mod_base = OTHER; note = 2'-O-methyladenosine-3'- phosphorothioate
  modified_base 19: mod_base = OTHER; note = 2'-O-methylcytidine-3'- phosphorothioate
  modified_base 20: mod_base = OTHER; note = 2'-O-methylguanosine-3'-phosphate
  misc_feature 1..5: note = RNA
  misc_feature 6..15: note = DNA
  misc_feature 16..20: note = RNA
cagccgttggggagaggacg

SEQ ID NO: 91 - DNA, 20 bp, synthetic construct
  source 1..20: mol_type = other DNA; note = Description of Artificial Sequence: Synthetic oligonucleotide; note = Description of Combined DNA/RNA Molecule: Synthetic oligonucleotide
  modified_base 1: mod_base = OTHER; note = 2'-O-methylguanosine-3'- phosphorothioate
  modified_base 2: mod_base = OTHER; note = 2'-O-methyluridine-3'-phosphorothioate
  modified_base 3: mod_base = OTHER; note = 2'-O-methylguanosine-3'- phosphorothioate
  modified_base 4: mod_base = OTHER; note = 2'-O-methylcytidine-3'- phosphorothioate
  modified_base 5: mod_base = OTHER; note = 2'-O-methylcytidine-3'- phosphorothioate
  modified_base 6: mod_base = OTHER; note = 2'-deoxyadenosine-3'-phosphorothioate
  modified_base 7: mod_base = OTHER; note = 2'-deoxyadenosine-3'-phosphorothioate
  modified_base 8: mod_base = OTHER; note = 2'-deoxyadenosine-3'-phosphorothioate
  modified_base 9: mod_base = OTHER; note = 2'-deoxyguanosine-3'-phosphorothioate
  modified_base 10: mod_base = OTHER; note = 2'-deoxyadenosine-3'-phosphorothioate
  modified_base 11: mod_base = OTHER; note = 5'-methyl-deoxycytidine-3'-phosphorothioate
  modified_base 12: mod_base = OTHER; note = 2'-deoxyadenosine-3'-phosphorothioate
  modified_base 13: mod_base = OTHER; note = 2'-deoxyguanosine-3'-phosphorothioate
  modified_base 14: mod_base = OTHER; note = 5'-methyl-deoxycytidine-3'-phosphorothioate
  modified_base 15: mod_base = OTHER; note = 5'-methyl-deoxycytidine-3'-phosphorothioate
  modified_base 16: mod_base = OTHER; note = 2'-O-methylguanosine-3'- phosphorothioate
  modified_base 17: mod_base = OTHER; note = 2'-O-methyluridine-3'-phosphorothioate
  modified_base 18: mod_base = OTHER; note = 2'-O-methyluridine-3'-phosphorothioate
  modified_base 19: mod_base = OTHER; note = 2'-O-methylguanosine-3'- phosphorothioate
  modified_base 20: mod_base = OTHER; note = 2'-O-methylguanosine-3'-phosphate
  misc_feature 1..5: note = RNA
  misc_feature 6..15: note = DNA
  misc_feature 16..20: note = RNA
gtgccaaagacagccgttgg

SEQ ID NO: 92 - DNA, 20 bp, synthetic construct
  source 1..20: mol_type = other DNA; note = Description of Artificial Sequence: Synthetic oligonucleotide; note = Description of Combined DNA/RNA Molecule: Synthetic oligonucleotide
  modified_base 1: mod_base = OTHER; note = 2'-O-methyladenosine-3'- phosphorothioate
  modified_base 2: mod_base = OTHER; note = 2'-O-methylguanosine-3'- phosphorothioate
  modified_base 3: mod_base = OTHER; note = 2'-O-methyladenosine-3'- phosphorothioate
  modified_base 4: mod_base = OTHER; note = 2'-O-methylguanosine-3'- phosphorothioate
  modified_base 5: mod_base = OTHER; note = 2'-O-methyladenosine-3'- phosphorothioate
  modified_base 6: mod_base = OTHER; note = 2'-deoxyguanosine-3'-phosphorothioate
  modified_base 7: mod_base = OTHER; note = 2'-deoxyguanosine-3'-phosphorothioate
  modified_base 8: mod_base = OTHER; note = 5'-methyl-deoxycytidine-3'-phosphorothioate
  modified_base 9: mod_base = OTHER; note = 5'-methyl-deoxycytidine-3'-phosphorothioate
  modified_base 10: mod_base = OTHER; note = 2'-deoxyadenosine-3'-phosphorothioate
  modified_base 11: mod_base = OTHER; note = 2'-deoxyguanosine-3'-phosphorothioate
  modified_base 12: mod_base = OTHER; note = 2'-deoxyguanosine-3'-phosphorothioate
  modified_base 13: mod_base = OTHER; note = 2'-deoxyguanosine-3'-phosphorothioate
  modified_base 14: mod_base = OTHER; note = 2'-deoxythymidine-3'-phosphorothioate
  modified_base 15: mod_base = OTHER; note = 2'-deoxyguanosine-3'-phosphorothioate
  modified_base 16: mod_base = OTHER; note = 2'-O-methylcytidine-3'- phosphorothioate
  modified_base 17: mod_base = OTHER; note = 2'-O-methylcytidine-3'- phosphorothioate
  modified_base 18: mod_base = OTHER; note = 2'-O-methyladenosine-3'- phosphorothioate
  modified_base 19: mod_base = OTHER; note = 2'-O-methyladenosine-3'- phosphorothioate
  modified_base 20: mod_base = OTHER; note = 2'-O-methyladenosine-3'-phosphate
  misc_feature 1..5: note = RNA
  misc_feature 6..15: note = DNA
  misc_feature 16..20: note = RNA
agagaggccagggtgccaaa

SEQ ID NO: 93 - DNA, 20 bp, synthetic construct
  source 1..20: mol_type = other DNA; note = Description of Artificial Sequence: Synthetic oligonucleotide; note = Description of Combined DNA/RNA Molecule: Synthetic oligonucleotide
  modified_base 1: mod_base = OTHER; note = 2'-O-methylcytidine-3'- phosphorothioate
  modified_base 2: mod_base = OTHER; note = 2'-O-methylcytidine-3'- phosphorothioate
  modified_base 3: mod_base = OTHER; note = 2'-O-methylcytidine-3'- phosphorothioate
  modified_base 4: mod_base = OTHER; note = 2'-O-methyladenosine-3'- phosphorothioate
  modified_base 5: mod_base = OTHER; note = 2'-O-methylguanosine-3'- phosphorothioate
  modified_base 6: mod_base = OTHER; note = 2'-deoxyadenosine-3'-phosphorothioate
  modified_base 7: mod_base = OTHER; note = 2'-deoxythymidine-3'-phosphorothioate
  modified_base 8: mod_base = OTHER; note = 2'-deoxyadenosine-3'-phosphorothioate
  modified_base 9: mod_base = OTHER; note = 2'-deoxyguanosine-3'-phosphorothioate
  modified_base 10: mod_base = OTHER; note = 2'-deoxyadenosine-3'-phosphorothioate
  modified_base 11: mod_base = OTHER; note = 2'-deoxyguanosine-3'-phosphorothioate
  modified_base 12: mod_base = OTHER; note = 2'-deoxyadenosine-3'-phosphorothioate
  modified_base 13: mod_base = OTHER; note = 2'-deoxyguanosine-3'-phosphorothioate
  modified_base 14: mod_base = OTHER; note = 2'-deoxyadenosine-3'-phosphorothioate
  modified_base 15: mod_base = OTHER; note = 2'-deoxyguanosine-3'-phosphorothioate
  modified_base 16: mod_base = OTHER; note = 2'-O-methylguanosine-3'- phosphorothioate
  modified_base 17: mod_base = OTHER; note = 2'-O-methylcytidine-3'- phosphorothioate
  modified_base 18: mod_base = OTHER; note = 2'-O-methylcytidine-3'- phosphorothioate
  modified_base 19: mod_base = OTHER; note = 2'-O-methyladenosine-3'- phosphorothioate
  modified_base 20: mod_base = OTHER; note = 2'-O-methylguanosine-3'-phosphate
  misc_feature 1..5: note = RNA
  misc_feature 6..15: note = DNA
  misc_feature 16..20: note = RNA
cccagatagagagaggccag

SEQ ID NO: 94 - DNA, 20 bp, synthetic construct
  source 1..20: mol_type = other DNA; note = Description of Artificial Sequence: Synthetic oligonucleotide; note = Description of Combined DNA/RNA Molecule: Synthetic oligonucleotide
  modified_base 1: mod_base = OTHER; note = 2'-O-methyluridine-3'-phosphorothioate
  modified_base 2: mod_base = OTHER; note = 2'-O-methylguanosine-3'- phosphorothioate
  modified_base 3: mod_base = OTHER; note = 2'-O-methylguanosine-3'- phosphorothioate
  modified_base 4: mod_base = OTHER; note = 2'-O-methyluridine-3'-phosphorothioate
  modified_base 5: mod_base = OTHER; note = 2'-O-methylcytidine-3'- phosphorothioate
  modified_base 6: mod_base = OTHER; note = 5'-methyl-deoxycytidine-3'-phosphorothioate
  modified_base 7: mod_base = OTHER; note = 2'-deoxyadenosine-3'-phosphorothioate
  modified_base 8: mod_base = OTHER; note = 2'-deoxyadenosine-3'-phosphorothioate
  modified_base 9: mod_base = OTHER; note = 2'-deoxyguanosine-3'-phosphorothioate
  modified_base 10: mod_base = OTHER; note = 2'-deoxyguanosine-3'-phosphorothioate
  modified_base 11: mod_base = OTHER; note = 5'-methyl-deoxycytidine-3'-phosphorothioate
  modified_base 12: mod_base = OTHER; note = 2'-deoxythymidine-3'-phosphorothioate
  modified_base 13: mod_base = OTHER; note = 5'-methyl-deoxycytidine-3'-phosphorothioate
  modified_base 14: mod_base = OTHER; note = 5'-methyl-deoxycytidine-3'-phosphorothioate
  modified_base 15: mod_base = OTHER; note = 5'-methyl-deoxycytidine-3'-phosphorothioate
  modified_base 16: mod_base = OTHER; note = 2'-O-methyladenosine-3'- phosphorothioate
  modified_base 17: mod_base = OTHER; note = 2'-O-methylguanosine-3'- phosphorothioate
  modified_base 18: mod_base = OTHER; note = 2'-O-methyladenosine-3'- phosphorothioate
  modified_base 19: mod_base = OTHER; note = 2'-O-methyluridine-3'-phosphorothioate
  modified_base 20: mod_base = OTHER; note = 2'-O-methyladenosine-3'-phosphate
  misc_feature 1..5: note = RNA
  misc_feature 6..15: note = DNA
  misc_feature 16..20: note = RNA
tggtccaaggctcccagata

SEQ ID NO: 95 - DNA, 20 bp, synthetic construct
  source 1..20: mol_type = other DNA; note = Description of Artificial Sequence: Synthetic oligonucleotide; note = Description of Combined DNA/RNA Molecule: Synthetic oligonucleotide
  modified_base 1: mod_base = OTHER; note = 2'-O-methylcytidine-3'- phosphorothioate
  modified_base 2: mod_base = OTHER; note = 2'-O-methyluridine-3'-phosphorothioate
  modified_base 3: mod_base = OTHER; note = 2'-O-methylguanosine-3'- phosphorothioate
  modified_base 4: mod_base = OTHER; note = 2'-O-methyluridine-3'-phosphorothioate
  modified_base 5: mod_base = OTHER; note = 2'-O-methylcytidine-3'- phosphorothioate
  modified_base 6: mod_base = OTHER; note = 2'-deoxyadenosine-3'-phosphorothioate
  modified_base 7: mod_base = OTHER; note = 2'-deoxyguanosine-3'-phosphorothioate
  modified_base 8: mod_base = OTHER; note = 5'-methyl-deoxycytidine-3'-phosphorothioate
  modified_base 9: mod_base = OTHER; note = 2'-deoxythymidine-3'-phosphorothioate
  modified_base 10: mod_base = OTHER; note = 2'-deoxyguanosine-3'-phosphorothioate
  modified_base 11: mod_base = OTHER; note = 2'-deoxythymidine-3'-phosphorothioate
  modified_base 12: mod_base = OTHER; note = 2'-deoxyguanosine-3'-phosphorothioate
  modified_base 13: mod_base = OTHER; note = 2'-deoxythymidine-3'-phosphorothioate
  modified_base 14: mod_base = OTHER; note = 2'-deoxyguanosine-3'-phosphorothioate
  modified_base 15: mod_base = OTHER; note = 2'-deoxyguanosine-3'-phosphorothioate
  modified_base 16: mod_base = OTHER; note = 2'-O-methyluridine-3'-phosphorothioate
  modified_base 17: mod_base = OTHER; note = 2'-O-methylcytidine-3'- phosphorothioate
  modified_base 18: mod_base = OTHER; note = 2'-O-methylcytidine-3'- phosphorothioate
  modified_base 19: mod_base = OTHER; note = 2'-O-methyladenosine-3'- phosphorothioate
  modified_base 20: mod_base = OTHER; note = 2'-O-methyladenosine-3'-phosphate
  misc_feature 1..5: note = RNA
  misc_feature 6..15: note = DNA
  misc_feature 16..20: note = RNA
ctgtcagctgtgtggtccaa

SEQ ID NO: 96 - DNA, 20 bp, synthetic construct
  source 1..20: mol_type = other DNA; note = Description of Artificial Sequence: Synthetic oligonucleotide; note = Description of Combined DNA/RNA Molecule: Synthetic oligonucleotide
  modified_base 1: mod_base = OTHER; note = 2'-O-methylguanosine-3'- phosphorothioate
  modified_base 2: mod_base = OTHER; note = 2'-O-methylcytidine-3'- phosphorothioate
  modified_base 3: mod_base = OTHER; note = 2'-O-methylcytidine-3'- phosphorothioate
  modified_base 4: mod_base = OTHER; note = 2'-O-methyluridine-3'-phosphorothioate
  modified_base 5: mod_base = OTHER; note = 2'-O-methylguanosine-3'- phosphorothioate
  modified_base 6: mod_base = OTHER; note = 2'-deoxythymidine-3'-phosphorothioate
  modified_base 7: mod_base = OTHER; note = 2'-deoxyadenosine-3'-phosphorothioate
  modified_base 8: mod_base = OTHER; note = 2'-deoxyguanosine-3'-phosphorothioate
  modified_base 9: mod_base = OTHER; note = 5'-methyl-deoxycytidine-3'-phosphorothioate
  modified_base 10: mod_base = OTHER; note = 5'-methyl-deoxycytidine-3'-phosphorothioate
  modified_base 11: mod_base = OTHER; note = 2'-deoxythymidine-3'-phosphorothioate
  modified_base 12: mod_base = OTHER; note = 2'-deoxyguanosine-3'-phosphorothioate
  modified_base 13: mod_base = OTHER; note = 2'-deoxythymidine-3'-phosphorothioate
  modified_base 14: mod_base = OTHER; note = 5'-methyl-deoxycytidine-3'-phosphorothioate
  modified_base 15: mod_base = OTHER; note = 2'-deoxyadenosine-3'-phosphorothioate
  modified_base 16: mod_base = OTHER; note = 2'-O-methylguanosine-3'- phosphorothioate
  modified_base 17: mod_base = OTHER; note = 2'-O-methylcytidine-3'- phosphorothioate
  modified_base 18: mod_base = OTHER; note = 2'-O-methyluridine-3'-phosphorothioate
  modified_base 19: mod_base = OTHER; note = 2'-O-methylguanosine-3'- phosphorothioate
  modified_base 20: mod_base = OTHER; note = 2'-O-methyluridine-3'-phosphate
  misc_feature 1..5: note = RNA
  misc_feature 6..15: note = DNA
  misc_feature 16..20: note = RNA
gcctgtagcctgtcagctgt

SEQ ID NO: 97 - DNA, 20 bp, synthetic construct
  source 1..20: mol_type = other DNA; note = Description of Artificial Sequence: Synthetic oligonucleotide; note = Description of Combined DNA/RNA Molecule: Synthetic oligonucleotide
  modified_base 1: mod_base = OTHER; note = 2'-O-methyladenosine-3'- phosphorothioate
  modified_base 2: mod_base = OTHER; note = 2'-O-methyladenosine-3'- phosphorothioate
  modified_base 3: mod_base = OTHER; note = 2'-O-methylcytidine-3'- phosphorothioate
  modified_base 4: mod_base = OTHER; note = 2'-O-methyladenosine-3'- phosphorothioate
  modified_base 5: mod_base = OTHER; note = 2'-O-methylcytidine-3'- phosphorothioate
  modified_base 6: mod_base = OTHER; note = 5'-methyl-deoxycytidine-3'-phosphorothioate
  modified_base 7: mod_base = OTHER; note = 5'-methyl-deoxycytidine-3'-phosphorothioate
  modified_base 8: mod_base = OTHER; note = 2'-deoxyadenosine-3'-phosphorothioate
  modified_base 9: mod_base = OTHER; note = 2'-deoxyguanosine-3'-phosphorothioate
  modified_base 10: mod_base = OTHER; note = 2'-deoxyguanosine-3'-phosphorothioate
  modified_base 11: mod_base = OTHER; note = 2'-deoxyadenosine-3'-phosphorothioate
  modified_base 12: mod_base = OTHER; note = 2'-deoxythymidine-3'-phosphorothioate
  modified_base 13: mod_base = OTHER; note = 2'-deoxythymidine-3'-phosphorothioate
  modified_base 14: mod_base = OTHER; note = 2'-deoxyguanosine-3'-phosphorothioate
  modified_base 15: mod_base = OTHER; note = 5'-methyl-deoxycytidine-3'-phosphorothioate
  modified_base 16: mod_base = OTHER; note = 2'-O-methylcytidine-3'- phosphorothioate
  modified_base 17: mod_base = OTHER; note = 2'-O-methyluridine-3'-phosphorothioate
  modified_base 18: mod_base = OTHER; note = 2'-O-methylguanosine-3'- phosphorothioate
  modified_base 19: mod_base = OTHER; note = 2'-O-methyluridine-3'-phosphorothioate
  modified_base 20: mod_base = OTHER; note = 2'-O-methyladenosine-3'-phosphate
  misc_feature 1..5: note = RNA
  misc_feature 6..15: note = DNA
  misc_feature 16..20: note = RNA
aacacccaggattgcctgta

SEQ ID NO: 98 - DNA, 20 bp, synthetic construct
  source 1..20: mol_type = other DNA; note = Description of Artificial Sequence: Synthetic oligonucleotide; note = Description of Combined DNA/RNA Molecule: Synthetic oligonucleotide
  modified_base 1: mod_base = OTHER; note = 2'-O-methylcytidine-3'- phosphorothioate
  modified_base 2: mod_base = OTHER; note = 2'-O-methyluridine-3'-phosphorothioate
  modified_base 3: mod_base = OTHER; note = 2'-O-methyluridine-3'-phosphorothioate
  modified_base 4: mod_base = OTHER; note = 2'-O-methylcytidine-3'- phosphorothioate
  modified_base 5: mod_base = OTHER; note = 2'-O-methylcytidine-3'- phosphorothioate
  modified_base 6: mod_base = OTHER; note = 2'-deoxyadenosine-3'-phosphorothioate
  modified_base 7: mod_base = OTHER; note = 2'-deoxyadenosine-3'-phosphorothioate
  modified_base 8: mod_base = OTHER; note = 2'-deoxyguanosine-3'-phosphorothioate
  modified_base 9: mod_base = OTHER; note = 2'-deoxyguanosine-3'-phosphorothioate
  modified_base 10: mod_base = OTHER; note = 2'-deoxyadenosine-3'-phosphorothioate
  modified_base 11: mod_base = OTHER; note = 2'-deoxyadenosine-3'-phosphorothioate
  modified_base 12: mod_base = OTHER; note = 5'-methyl-deoxycytidine-3'-phosphorothioate
  modified_base 13: mod_base = OTHER; note = 2'-deoxyadenosine-3'-phosphorothioate
  modified_base 14: mod_base = OTHER; note = 5'-methyl-deoxycytidine-3'-phosphorothioate
  modified_base 15: mod_base = OTHER; note = 5'-methyl-deoxycytidine-3'-phosphorothioate
  modified_base 16: mod_base = OTHER; note = 2'-O-methylcytidine-3'- phosphorothioate
  modified_base 17: mod_base = OTHER; note = 2'-O-methyladenosine-3'- phosphorothioate
  modified_base 18: mod_base = OTHER; note = 2'-O-methylguanosine-3'- phosphorothioate
  modified_base 19: mod_base = OTHER; note = 2'-O-methylguanosine-3'- phosphorothioate
  modified_base 20: mod_base = OTHER; note = 2'-O-methyladenosine-3'-phosphate
  misc_feature 1..5: note = RNA
  misc_feature 6..15: note = DNA
  misc_feature 16..20: note = RNA
cttccaaggaacacccagga

SEQ ID NO: 99 - DNA, 20 bp, synthetic construct
  source 1..20: mol_type = other DNA; note = Description of Artificial Sequence: Synthetic oligonucleotide; note = Description of Combined DNA/RNA Molecule: Synthetic oligonucleotide
  modified_base 1: mod_base = OTHER; note = 2'-O-methyluridine-3'-phosphorothioate
  modified_base 2: mod_base = OTHER; note = 2'-O-methylguanosine-3'- phosphorothioate
  modified_base 3: mod_base = OTHER; note = 2'-O-methylcytidine-3'- phosphorothioate
  modified_base 4: mod_base = OTHER; note = 2'-O-methyladenosine-3'- phosphorothioate
  modified_base 5: mod_base = OTHER; note = 2'-O-methylguanosine-3'- phosphorothioate
  modified_base 6: mod_base = OTHER; note = 2'-deoxythymidine-3'-phosphorothioate
  modified_base 7: mod_base = OTHER; note = 2'-deoxythymidine-3'-phosphorothioate
  modified_base 8: mod_base = OTHER; note = 5'-methyl-deoxycytidine-3'-phosphorothioate
  modified_base 9: mod_base = OTHER; note = 2'-deoxythymidine-3'-phosphorothioate
  modified_base 10: mod_base = OTHER; note = 2'-deoxythymidine-3'-phosphorothioate
  modified_base 11: mod_base = OTHER; note = 2'-deoxyguanosine-3'-phosphorothioate
  modified_base 12: mod_base = OTHER; note = 2'-deoxythymidine-3'-phosphorothioate
  modified_base 13: mod_base = OTHER; note = 5'-methyl-deoxycytidine-3'-phosphorothioate
  modified_base 14: mod_base = OTHER; note = 5'-methyl-deoxycytidine-3'-phosphorothioate
  modified_base 15: mod_base = OTHER; note = 2'-deoxythymidine-3'-phosphorothioate
  modified_base 16: mod_base = OTHER; note = 2'-O-methyluridine-3'-phosphorothioate
  modified_base 17: mod_base = OTHER; note = 2'-O-methylcytidine-3'- phosphorothioate
  modified_base 18: mod_base = OTHER; note = 2'-O-methylcytidine-3'- phosphorothioate
  modified_base 19: mod_base = OTHER; note = 2'-O-methyladenosine-3'- phosphorothioate
  modified_base 20: mod_base = OTHER; note = 2'-O-methyladenosine-3'-phosphate
  misc_feature 1..5: note = RNA
  misc_feature 6..15: note = DNA
  misc_feature 16..20: note = RNA
tgcagttcttgtccttccaa

SEQ ID NO: 100 - DNA, 20 bp, synthetic construct
  source 1..20: mol_type = other DNA; note = Description of Artificial Sequence: Synthetic oligonucleotide; note = Description of Combined DNA/RNA Molecule: Synthetic oligonucleotide
  modified_base 1: mod_base = OTHER; note = 2'-O-methylcytidine-3'- phosphorothioate
  modified_base 2: mod_base = OTHER; note = 2'-O-methyladenosine-3'- phosphorothioate
  modified_base 3: mod_base = OTHER; note = 2'-O-methylguanosine-3'- phosphorothioate
  modified_base 4: mod_base = OTHER; note = 2'-O-methylcytidine-3'- phosphorothioate
  modified_base 5: mod_base = OTHER; note = 2'-O-methylcytidine-3'- phosphorothioate
  modified_base 6: mod_base = OTHER; note = 2'-deoxyguanosine-3'-phosphorothioate
  modified_base 7: mod_base = OTHER; note = 2'-deoxyguanosine-3'-phosphorothioate
  modified_base 8: mod_base = OTHER; note = 2'-deoxyguanosine-3'-phosphorothioate
  modified_base 9: mod_base = OTHER; note = 2'-deoxyadenosine-3'-phosphorothioate
  modified_base 10: mod_base = OTHER; note = 2'-deoxyguanosine-3'-phosphorothioate
  modified_base 11: mod_base = OTHER; note = 2'-deoxyguanosine-3'-phosphorothioate
  modified_base 12: mod_base = OTHER; note = 2'-deoxythymidine-3'-phosphorothioate
  modified_base 13: mod_base = OTHER; note = 2'-deoxyguanosine-3'-phosphorothioate
  modified_base 14: mod_base = OTHER; note = 5'-methyl-deoxycytidine-3'-phosphorothioate
  modified_base 15: mod_base = OTHER; note = 2'-deoxyadenosine-3'-phosphorothioate
  modified_base 16: mod_base = OTHER; note = 2'-O-methylguanosine-3'- phosphorothioate
  modified_base 17: mod_base = OTHER; note = 2'-O-methyluridine-3'-phosphorothioate
  modified_base 18: mod_base = OTHER; note = 2'-O-methyluridine-3'-phosphorothioate
  modified_base 19: mod_base = OTHER; note = 2'-O-methylcytidine-3'- phosphorothioate
  modified_base 20: mod_base = OTHER; note = 2'-O-methyluridine-3'-phosphate
  misc_feature 1..5: note = RNA
  misc_feature 6..15: note = DNA
  misc_feature 16..20: note = RNA
cagccgggaggtgcagttct

SEQ ID NO: 101 - DNA, 20 bp, synthetic construct
  source 1..20: mol_type = other DNA; note = Description of Artificial Sequence: Synthetic oligonucleotide; note = Description of Combined DNA/RNA Molecule: Synthetic oligonucleotide
  modified_base 1: mod_base = OTHER; note = 2'-O-methyluridine-3'-phosphorothioate
  modified_base 2: mod_base = OTHER; note = 2'-O-methyluridine-3'-phosphorothioate
  modified_base 3: mod_base = OTHER; note = 2'-O-methylguanosine-3'- phosphorothioate
  modified_base 4: mod_base = OTHER; note = 2'-O-methyluridine-3'-phosphorothioate
  modified_base 5: mod_base = OTHER; note = 2'-O-methylguanosine-3'- phosphorothioate
  modified_base 6: mod_base = OTHER; note = 5'-methyl-deoxycytidine-3'-phosphorothioate
  modified_base 7: mod_base = OTHER; note = 2'-deoxyguanosine-3'-phosphorothioate
  modified_base 8: mod_base = OTHER; note = 5'-methyl-deoxycytidine-3'-phosphorothioate
  modified_base 9: mod_base = OTHER; note = 2'-deoxyadenosine-3'-phosphorothioate
  modified_base 10: mod_base = OTHER; note = 2'-deoxythymidine-3'-phosphorothioate
  modified_base 11: mod_base = OTHER; note = 5'-methyl-deoxycytidine-3'-phosphorothioate
  modified_base 12: mod_base = OTHER; note = 5'-methyl-deoxycytidine-3'-phosphorothioate
  modified_base 13: mod_base = OTHER; note = 2'-deoxyadenosine-3'-phosphorothioate
  modified_base 14: mod_base = OTHER; note = 2'-deoxyguanosine-3'-phosphorothioate
  modified_base 15: mod_base = OTHER; note = 5'-methyl-deoxycytidine-3'-phosphorothioate
  modified_base 16: mod_base = OTHER; note = 2'-O-methylcytidine-3'- phosphorothioate
  modified_base 17: mod_base = OTHER; note = 2'-O-methylguanosine-3'- phosphorothioate
  modified_base 18: mod_base = OTHER; note = 2'-O-methylguanosine-3'- phosphorothioate
  modified_base 19: mod_base = OTHER; note = 2'-O-methylguanosine-3'- phosphorothioate
  modified_base 20: mod_base = OTHER; note = 2'-O-methyladenosine-3'-phosphate
  misc_feature 1..5: note = RNA
  misc_feature 6..15: note = DNA
  misc_feature 16..20: note = RNA
ttgtgcgcatccagccggga

SEQ ID NO: 102 - DNA, 20 bp, synthetic construct
  source 1..20: mol_type = other DNA; note = Description of Artificial Sequence: Synthetic oligonucleotide; note = Description of Combined DNA/RNA Molecule: Synthetic oligonucleotide
  modified_base 1: mod_base = OTHER; note = 2'-O-methylcytidine-3'- phosphorothioate
  modified_base 2: mod_base = OTHER; note = 2'-O-methyladenosine-3'- phosphorothioate
  modified_base 3: mod_base = OTHER; note = 2'-O-methylguanosine-3'- phosphorothioate
  modified_base 4: mod_base = OTHER; note = 2'-O-methyladenosine-3'- phosphorothioate
  modified_base 5: mod_base = OTHER; note = 2'-O-methylcytidine-3'- phosphorothioate
  modified_base 6: mod_base = OTHER; note = 2'-deoxyadenosine-3'-phosphorothioate
  modified_base 7: mod_base = OTHER; note = 2'-deoxyguanosine-3'-phosphorothioate
  modified_base 8: mod_base = OTHER; note = 2'-deoxyguanosine-3'-phosphorothioate
  modified_base 9: mod_base = OTHER; note = 2'-deoxyadenosine-3'-phosphorothioate
  modified_base 10: mod_base = OTHER; note = 5'-methyl-deoxycytidine-3'-phosphorothioate
  modified_base 11: mod_base = OTHER; note = 5'-methyl-deoxycytidine-3'-phosphorothioate
  modified_base 12: mod_base = OTHER; note = 2'-deoxythymidine-3'-phosphorothioate
  modified_base 13: mod_base = OTHER; note = 2'-deoxythymidine-3'-phosphorothioate
  modified_base 14: mod_base = OTHER; note = 2'-deoxyguanosine-3'-phosphorothioate
  modified_base 15: mod_base = OTHER; note = 2'-deoxythymidine-3'-phosphorothioate
  modified_base 16: mod_base = OTHER; note = 2'-O-methylguanosine-3'- phosphorothioate
  modified_base 17: mod_base = OTHER; note = 2'-O-methylcytidine-3'- phosphorothioate
  modified_base 18: mod_base = OTHER; note = 2'-O-methylguanosine-3'- phosphorothioate
  modified_base 19: mod_base = OTHER; note = 2'-O-methylcytidine-3'- phosphorothioate
  modified_base 20: mod_base = OTHER; note = 2'-O-methyladenosine-3'-phosphate
  misc_feature 1..5: note = RNA
  misc_feature 6..15: note = DNA
  misc_feature 16..20: note = RNA
cagacaggaccttgtgcgca

SEQ ID NO: 103 - DNA, 20 bp, synthetic construct
  source 1..20: mol_type = other DNA; note = Description of Artificial Sequence: Synthetic oligonucleotide; note = Description of Combined DNA/RNA Molecule: Synthetic oligonucleotide
  modified_base 1: mod_base = OTHER; note = 2'-O-methyladenosine-3'- phosphorothioate
  modified_base 2: mod_base = OTHER; note = 2'-O-methylguanosine-3'- phosphorothioate
  modified_base 3: mod_base = OTHER; note = 2'-O-methylcytidine-3'- phosphorothioate
  modified_base 4: mod_base = OTHER; note = 2'-O-methylcytidine-3'- phosphorothioate
  modified_base 5: mod_base = OTHER; note = 2'-O-methyluridine-3'-phosphorothioate
  modified_base 6: mod_base = OTHER; note = 2'-deoxyguanosine-3'-phosphorothioate
  modified_base 7: mod_base = OTHER; note = 5'-methyl-deoxycytidine-3'-phosphorothioate
  modified_base 8: mod_base = OTHER; note = 2'-deoxyadenosine-3'-phosphorothioate
  modified_base 9: mod_base = OTHER; note = 2'-deoxyguanosine-3'-phosphorothioate
  modified_base 10: mod_base = OTHER; note = 2'-deoxyguanosine-3'-phosphorothioate
  modified_base 11: mod_base = OTHER; note = 2'-deoxyguanosine-3'-phosphorothioate
  modified_base 12: mod_base = OTHER; note = 5'-methyl-deoxycytidine-3'-phosphorothioate
  modified_base 13: mod_base = OTHER; note = 2'-deoxyadenosine-3'-phosphorothioate
  modified_base 14: mod_base = OTHER; note = 2'-deoxyguanosine-3'-phosphorothioate
  modified_base 15: mod_base = OTHER; note = 2'-deoxyadenosine-3'-phosphorothioate
  modified_base 16: mod_base = OTHER; note = 2'-O-methylcytidine-3'- phosphorothioate
  modified_base 17: mod_base = OTHER; note = 2'-O-methyladenosine-3'- phosphorothioate
  modified_base 18: mod_base = OTHER; note = 2'-O-methylguanosine-3'- phosphorothioate
  modified_base 19: mod_base = OTHER; note = 2'-O-methylguanosine-3'- phosphorothioate
  modified_base 20: mod_base = OTHER; note = 2'-O-methyladenosine-3'-phosphate
  misc_feature 1..5: note = RNA
  misc_feature 6..15: note = DNA
  misc_feature 16..20: note = RNA
agcctgcagggcagacagga

SEQ ID NO: 104 - DNA, 20 bp, synthetic construct
  source 1..20: mol_type = other DNA; note = Description of Artificial Sequence: Synthetic oligonucleotide; note = Description of Combined DNA/RNA Molecule: Synthetic oligonucleotide
  modified_base 1: mod_base = OTHER; note = 2'-O-methyladenosine-3'- phosphorothioate
  modified_base 2: mod_base = OTHER; note = 2'-O-methylguanosine-3'- phosphorothioate
  modified_base 3: mod_base = OTHER; note = 2'-O-methylguanosine-3'- phosphorothioate
  modified_base 4: mod_base = OTHER; note = 2'-O-methylcytidine-3'- phosphorothioate
  modified_base 5: mod_base = OTHER; note = 2'-O-methylcytidine-3'- phosphorothioate
  modified_base 6: mod_base = OTHER; note = 5'-methyl-deoxycytidine-3'-phosphorothioate
  modified_base 7: mod_base = OTHER; note = 2'-deoxythymidine-3'-phosphorothioate
  modified_base 8: mod_base = OTHER; note = 2'-deoxyguanosine-3'-phosphorothioate
  modified_base 9: mod_base = OTHER; note = 2'-deoxythymidine-3'-phosphorothioate
  modified_base 10: mod_base = OTHER; note = 2'-deoxyadenosine-3'-phosphorothioate
  modified_base 11: mod_base = OTHER; note = 5'-methyl-deoxycytidine-3'-phosphorothioate
  modified_base 12: mod_base = OTHER; note = 2'-deoxyadenosine-3'-phosphorothioate
  modified_base 13: mod_base = OTHER; note = 2'-deoxyguanosine-3'-phosphorothioate
  modified_base 14: mod_base = OTHER; note = 5'-methyl-deoxycytidine-3'-phosphorothioate
  modified_base 15: mod_base = OTHER; note = 5'-methyl-deoxycytidine-3'-phosphorothioate
  modified_base 16: mod_base = OTHER; note = 2'-O-methyluridine-3'-phosphorothioate
  modified_base 17: mod_base = OTHER; note = 2'-O-methylguanosine-3'- phosphorothioate
  modified_base 18: mod_base = OTHER; note = 2'-O-methylcytidine-3'- phosphorothioate
  modified_base 19: mod_base = OTHER; note = 2'-O-methyladenosine-3'- phosphorothioate
  modified_base 20: mod_base = OTHER; note = 2'-O-methylguanosine-3'-phosphate
  misc_feature 1..5: note = RNA
  misc_feature 6..15: note = DNA
  misc_feature 16..20: note = RNA
aggccctgtacagcctgcag

SEQ ID NO: 105 - DNA, 20 bp, synthetic construct
  source 1..20: mol_type = other DNA; note = Description of Artificial Sequence: Synthetic oligonucleotide; note = Description of Combined DNA/RNA Molecule: Synthetic oligonucleotide
  modified_base 1: mod_base = OTHER; note = 2'-O-methylguanosine-3'- phosphorothioate
  modified_base 2: mod_base = OTHER; note = 2'-O-methylguanosine-3'- phosphorothioate
  modified_base 3: mod_base = OTHER; note = 2'-O-methylcytidine-3'- phosphorothioate
  modified_base 4: mod_base = OTHER; note = 2'-O-methylcytidine-3'- phosphorothioate
  modified_base 5: mod_base = OTHER; note = 2'-O-methyladenosine-3'- phosphorothioate
  modified_base 6: mod_base = OTHER; note = 5'-methyl-deoxycytidine-3'-phosphorothioate
  modified_base 7: mod_base = OTHER; note = 2'-deoxythymidine-3'-phosphorothioate
  modified_base 8: mod_base = OTHER; note = 2'-deoxyadenosine-3'-phosphorothioate
  modified_base 9: mod_base = OTHER; note = 2'-deoxyguanosine-3'-phosphorothioate
  modified_base 10: mod_base = OTHER; note = 5'-methyl-deoxycytidine-3'-phosphorothioate
  modified_base 11: mod_base = OTHER; note = 2'-deoxyadenosine-3'-phosphorothioate
  modified_base 12: mod_base = OTHER; note = 2'-deoxyguanosine-3'-phosphorothioate
  modified_base 13: mod_base = OTHER; note = 2'-deoxyguanosine-3'-phosphorothioate
  modified_base 14: mod_base = OTHER; note = 5'-methyl-deoxycytidine-3'-phosphorothioate
  modified_base 15: mod_base = OTHER; note = 5'-methyl-deoxycytidine-3'-phosphorothioate
  modified_base 16: mod_base = OTHER; note = 2'-O-methylcytidine-3'- phosphorothioate
  modified_base 17: mod_base = OTHER; note = 2'-O-methyluridine-3'-phosphorothioate
  modified_base 18: mod_base = OTHER; note = 2'-O-methylguanosine-3'- phosphorothioate
  modified_base 19: mod_base = OTHER; note = 2'-O-methyluridine-3'-phosphorothioate
  modified_base 20: mod_base = OTHER; note = 2'-O-methyladenosine-3'-phosphate
  misc_feature 1..5: note = RNA
  misc_feature 6..15: note = DNA
  misc_feature 16..20: note = RNA
ggccactagcaggccctgta

SEQ ID NO: 106 - DNA, 20 bp, synthetic construct
  source 1..20: mol_type = other DNA; note = Description of Artificial Sequence: Synthetic oligonucleotide; note = Description of Combined DNA/RNA Molecule: Synthetic oligonucleotide
  modified_base 1: mod_base = OTHER; note = 2'-O-methyladenosine-3'- phosphorothioate
  modified_base 2: mod_base = OTHER; note = 2'-O-methylguanosine-3'- phosphorothioate
  modified_base 3: mod_base = OTHER; note = 2'-O-methylcytidine-3'- phosphorothioate
  modified_base 4: mod_base = OTHER; note = 2'-O-methylcytidine-3'- phosphorothioate
  modified_base 5: mod_base = OTHER; note = 2'-O-methylcytidine-3'- phosphorothioate
  modified_base 6: mod_base = OTHER; note = 2'-deoxythymidine-3'-phosphorothioate
  modified_base 7: mod_base = OTHER; note = 2'-deoxyguanosine-3'-phosphorothioate
  modified_base 8: mod_base = OTHER; note = 5'-methyl-deoxycytidine-3'-phosphorothioate
  modified_base 9: mod_base = OTHER; note = 5'-methyl-deoxycytidine-3'-phosphorothioate
  modified_base 10: mod_base = OTHER; note = 5'-methyl-deoxycytidine-3'-phosphorothioate
  modified_base 11: mod_base = OTHER; note = 2'-deoxythymidine-3'-phosphorothioate
  modified_base 12: mod_base = OTHER; note = 2'-deoxyguanosine-3'-phosphorothioate
  modified_base 13: mod_base = OTHER; note = 2'-deoxyguanosine-3'-phosphorothioate
  modified_base 14: mod_base = OTHER; note = 2'-deoxyguanosine-3'-phosphorothioate
  modified_base 15: mod_base = OTHER; note = 5'-methyl-deoxycytidine-3'-phosphorothioate
  modified_base 16: mod_base = OTHER; note = 2'-O-methylcytidine-3'- phosphorothioate
  modified_base 17: mod_base = OTHER; note = 2'-O-methyladenosine-3'- phosphorothioate
  modified_base 18: mod_base = OTHER; note = 2'-O-methylcytidine-3'- phosphorothioate
  modified_base 19: mod_base = OTHER; note = 2'-O-methyluridine-3'-phosphorothioate
  modified_base 20: mod_base = OTHER; note = 2'-O-methyladenosine-3'-phosphate
  misc_feature 1..5: note = RNA
  misc_feature 6..15: note = DNA
  misc_feature 16..20: note = RNA
agccctgccctgggccacta

SEQ ID NO: 107 - DNA, 20 bp, synthetic construct
  source 1..20: mol_type = other DNA; note = Description of Artificial Sequence: Synthetic oligonucleotide; note = Description of Combined DNA/RNA Molecule: Synthetic oligonucleotide
  modified_base 1: mod_base = OTHER; note = 2'-O-methylcytidine-3'- phosphorothioate
  modified_base 2: mod_base = OTHER; note = 2'-O-methyluridine-3'-phosphorothioate
  modified_base 3: mod_base = OTHER; note = 2'-O-methylguanosine-3'- phosphorothioate
  modified_base 4: mod_base = OTHER; note = 2'-O-methylguanosine-3'- phosphorothioate
  modified_base 5: mod_base = OTHER; note = 2'-O-methylcytidine-3'- phosphorothioate
  modified_base 6: mod_base = OTHER; note = 2'-deoxythymidine-3'-phosphorothioate
  modified_base 7: mod_base = OTHER; note = 2'-deoxyadenosine-3'-phosphorothioate
  modified_base 8: mod_base = OTHER; note = 2'-deoxythymidine-3'-phosphorothioate
  modified_base 9: mod_base = OTHER; note = 5'-methyl-deoxycytidine-3'-phosphorothioate
  modified_base 10: mod_base = OTHER; note = 2'-deoxyadenosine-3'-phosphorothioate
  modified_base 11: mod_base = OTHER; note = 2'-deoxyguanosine-3'-phosphorothioate
  modified_base 12: mod_base = OTHER; note = 5'-methyl-deoxycytidine-3'-phosphorothioate
  modified_base 13: mod_base = OTHER; note = 5'-methyl-deoxycytidine-3'-phosphorothioate
  modified_base 14: mod_base = OTHER; note = 5'-methyl-deoxycytidine-3'-phosphorothioate
  modified_base 15: mod_base = OTHER; note = 2'-deoxythymidine-3'-phosphorothioate
  modified_base 16: mod_base = OTHER; note = 2'-O-methylguanosine-3'- phosphorothioate
  modified_base 17: mod_base = OTHER; note = 2'-O-methylcytidine-3'- phosphorothioate
  modified_base 18: mod_base = OTHER; note = 2'-O-methylcytidine-3'- phosphorothioate
  modified_base 19: mod_base = OTHER; note = 2'-O-methylcytidine-3'- phosphorothioate
  modified_base 20: mod_base = OTHER; note = 2'-O-methyluridine-3'-phosphate
  misc_feature 1..5: note = RNA
  misc_feature 6..15: note = DNA
  misc_feature 16..20: note = RNA
ctggctatcagccctgccct

SEQ ID NO: 108 - DNA, 20 bp, synthetic construct
  source 1..20: mol_type = other DNA; note = Description of Artificial Sequence: Synthetic oligonucleotide; note = Description of Combined DNA/RNA Molecule: Synthetic oligonucleotide
  modified_base 1: mod_base = OTHER; note = 2'-O-methylguanosine-3'- phosphorothioate
  modified_base 2: mod_base = OTHER; note = 2'-O-methylcytidine-3'- phosphorothioate
  modified_base 3: mod_base = OTHER; note = 2'-O-methyladenosine-3'- phosphorothioate
  modified_base 4: mod_base = OTHER; note = 2'-O-methylguanosine-3'- phosphorothioate
  modified_base 5: mod_base = OTHER; note = 2'-O-methylcytidine-3'- phosphorothioate
  modified_base 6: mod_base = OTHER; note = 2'-deoxyadenosine-3'-phosphorothioate
  modified_base 7: mod_base = OTHER; note = 2'-deoxyguanosine-3'-phosphorothioate
  modified_base 8: mod_base = OTHER; note = 5'-methyl-deoxycytidine-3'-phosphorothioate
  modified_base 9: mod_base = OTHER; note = 2'-deoxythymidine-3'-phosphorothioate
  modified_base 10: mod_base = OTHER; note = 2'-deoxyguanosine-3'-phosphorothioate
  modified_base 11: mod_base = OTHER; note = 2'-deoxyguanosine-3'-phosphorothioate
  modified_base 12: mod_base = OTHER; note = 2'-deoxyguanosine-3'-phosphorothioate
  modified_base 13: mod_base = OTHER; note = 5'-methyl-deoxycytidine-3'-phosphorothioate
  modified_base 14: mod_base = OTHER; note = 5'-methyl-deoxycytidine-3'-phosphorothioate
  modified_base 15: mod_base = OTHER; note = 2'-deoxythymidine-3'-phosphorothioate
  modified_base 16: mod_base = OTHER; note = 2'-O-methylguanosine-3'- phosphorothioate
  modified_base 17: mod_base = OTHER; note = 2'-O-methylguanosine-3'- phosphorothioate
  modified_base 18: mod_base = OTHER; note = 2'-O-methylcytidine-3'- phosphorothioate
  modified_base 19: mod_base = OTHER; note = 2'-O-methyluridine-3'-phosphorothioate
  modified_base 20: mod_base = OTHER; note = 2'-O-methyladenosine-3'-phosphate
  misc_feature 1..5: note = RNA
  misc_feature 6..15: note = DNA
  misc_feature 16..20: note = RNA
gcagcagctgggcctggcta

SEQ ID NO: 109 - DNA, 20 bp, synthetic construct
  source 1..20: mol_type = other DNA; note = Description of Artificial Sequence: Synthetic oligonucleotide; note = Description of Combined DNA/RNA Molecule: Synthetic oligonucleotide
  modified_base 1: mod_base = OTHER; note = 2'-O-methylcytidine-3'- phosphorothioate
  modified_base 2: mod_base = OTHER; note = 2'-O-methyladenosine-3'- phosphorothioate
  modified_base 3: mod_base = OTHER; note = 2'-O-methylcytidine-3'- phosphorothioate
  modified_base 4: mod_base = OTHER; note = 2'-O-methylcytidine-3'- phosphorothioate
  modified_base 5: mod_base = OTHER; note = 2'-O-methylguanosine-3'- phosphorothioate
  modified_base 6: mod_base = OTHER; note = 2'-deoxythymidine-3'-phosphorothioate
  modified_base 7: mod_base = OTHER; note = 2'-deoxyguanosine-3'-phosphorothioate
  modified_base 8: mod_base = OTHER; note = 2'-deoxyguanosine-3'-phosphorothioate
  modified_base 9: mod_base = OTHER; note = 2'-deoxyadenosine-3'-phosphorothioate
  modified_base 10: mod_base = OTHER; note = 5'-methyl-deoxycytidine-3'-phosphorothioate
  modified_base 11: mod_base = OTHER; note = 2'-deoxyadenosine-3'-phosphorothioate
  modified_base 12: mod_base = OTHER; note = 2'-deoxyguanosine-3'-phosphorothioate
  modified_base 13: mod_base = OTHER; note = 5'-methyl-deoxycytidine-3'-phosphorothioate
  modified_base 14: mod_base = OTHER; note = 2'-deoxyadenosine-3'-phosphorothioate
  modified_base 15: mod_base = OTHER; note = 2'-deoxyguanosine-3'-phosphorothioate
  modified_base 16: mod_base = OTHER; note = 2'-O-methylcytidine-3'- phosphorothioate
  modified_base 17: mod_base = OTHER; note = 2'-O-methyladenosine-3'- phosphorothioate
  modified_base 18: mod_base = OTHER; note = 2'-O-methylguanosine-3'- phosphorothioate
  modified_base 19: mod_base = OTHER; note = 2'-O-methylcytidine-3'- phosphorothioate
  modified_base 20: mod_base = OTHER; note = 2'-O-methyluridine-3'-phosphate
  misc_feature 1..5: note = RNA
  misc_feature 6..15: note = DNA
  misc_feature 16..20: note = RNA
caccgtggacagcagcagct

SEQ ID NO: 110 - DNA, 20 bp, synthetic construct
  source 1..20: mol_type = other DNA; note = Description of Artificial Sequence: Synthetic oligonucleotide; note = Description of Combined DNA/RNA Molecule: Synthetic oligonucleotide
  modified_base 1: mod_base = OTHER; note = 2'-O-methyladenosine-3'- phosphorothioate
  modified_base 2: mod_base = OTHER; note = 2'-O-methyladenosine-3'- phosphorothioate
  modified_base 3: mod_base = OTHER; note = 2'-O-methylcytidine-3'- phosphorothioate
  modified_base 4: mod_base = OTHER; note = 2'-O-methyladenosine-3'- phosphorothioate
  modified_base 5: mod_base = OTHER; note = 2'-O-methylcytidine-3'- phosphorothioate
  modified_base 6: mod_base = OTHER; note = 2'-deoxyguanosine-3'-phosphorothioate
  modified_base 7: mod_base = OTHER; note = 5'-methyl-deoxycytidine-3'-phosphorothioate
  modified_base 8: mod_base = OTHER; note = 5'-methyl-deoxycytidine-3'-phosphorothioate
  modified_base 9: mod_base = OTHER; note = 5'-methyl-deoxycytidine-3'-phosphorothioate
  modified_base 10: mod_base = OTHER; note = 2'-deoxyadenosine-3'-phosphorothioate
  modified_base 11: mod_base = OTHER; note = 5'-methyl-deoxycytidine-3'-phosphorothioate
  modified_base 12: mod_base = OTHER; note = 5'-methyl-deoxycytidine-3'-phosphorothioate
  modified_base 13: mod_base = OTHER; note = 2'-deoxyadenosine-3'-phosphorothioate
  modified_base 14: mod_base = OTHER; note = 5'-methyl-deoxycytidine-3'-phosphorothioate
  modified_base 15: mod_base = OTHER; note = 5'-methyl-deoxycytidine-3'-phosphorothioate
  modified_base 16: mod_base = OTHER; note = 2'-O-methylguanosine-3'- phosphorothioate
  modified_base 17: mod_base = OTHER; note = 2'-O-methyluridine-3'-phosphorothioate
  modified_base 18: mod_base = OTHER; note = 2'-O-methylguanosine-3'- phosphorothioate
  modified_base 19: mod_base = OTHER; note = 2'-O-methylguanosine-3'- phosphorothioate
  modified_base 20: mod_base = OTHER; note = 2'-O-methyladenosine-3'-phosphate
  misc_feature 1..5: note = RNA
  misc_feature 6..15: note = DNA
  misc_feature 16..20: note = RNA
aacacgcccaccaccgtgga

SEQ ID NO: 111 - DNA, 20 bp, synthetic construct
  source 1..20: mol_type = other DNA; note = Description of Artificial Sequence: Synthetic oligonucleotide; note = Description of Combined DNA/RNA Molecule: Synthetic oligonucleotide
  modified_base 1: mod_base = OTHER; note = 2'-O-methyluridine-3'-phosphorothioate
  modified_base 2: mod_base = OTHER; note = 2'-O-methylguanosine-3'- phosphorothioate
  modified_base 3: mod_base = OTHER; note = 2'-O-methylguanosine-3'- phosphorothioate
  modified_base 4: mod_base = OTHER; note = 2'-O-methylguanosine-3'- phosphorothioate
  modified_base 5: mod_base = OTHER; note = 2'-O-methylguanosine-3'- phosphorothioate
  modified_base 6: mod_base = OTHER; note = 5'-methyl-deoxycytidine-3'-phosphorothioate
  modified_base 7: mod_base = OTHER; note = 2'-deoxythymidine-3'-phosphorothioate
  modified_base 8: mod_base = OTHER; note = 2'-deoxyguanosine-3'-phosphorothioate
  modified_base 9: mod_base = OTHER; note = 2'-deoxythymidine-3'-phosphorothioate
  modified_base 10: mod_base = OTHER; note = 2'-deoxyguanosine-3'-phosphorothioate
  modified_base 11: mod_base = OTHER; note = 2'-deoxyadenosine-3'-phosphorothioate
  modified_base 12: mod_base = OTHER; note = 2'-deoxyadenosine-3'-phosphorothioate
  modified_base 13: mod_base = OTHER; note = 5'-methyl-deoxycytidine-3'-phosphorothioate
  modified_base 14: mod_base = OTHER; note = 2'-deoxyadenosine-3'-phosphorothioate
  modified_base 15: mod_base = OTHER; note = 5'-methyl-deoxycytidine-3'-phosphorothioate
  modified_base 16: mod_base = OTHER; note = 2'-O-methylguanosine-3'- phosphorothioate
  modified_base 17: mod_base = OTHER; note = 2'-O-methylcytidine-3'- phosphorothioate
  modified_base 18: mod_base = OTHER; note = 2'-O-methylcytidine-3'- phosphorothioate
  modified_base 19: mod_base = OTHER; note = 2'-O-methylcytidine-3'- phosphorothioate
  modified_base 20: mod_base = OTHER; note = 2'-O-methyladenosine-3'-phosphate
  misc_feature 1..5: note = RNA
  misc_feature 6..15: note = DNA
  misc_feature 16..20: note = RNA
tggggctgtgaacacgccca

SEQ ID NO: 112 - DNA, 20 bp, synthetic construct
  source 1..20: mol_type = other DNA; note = Description of Artificial Sequence: Synthetic oligonucleotide; note = Description of Combined DNA/RNA Molecule: Synthetic oligonucleotide
  modified_base 1: mod_base = OTHER; note = 2'-O-methylguanosine-3'- phosphorothioate
  modified_base 2: mod_base = OTHER; note = 2'-O-methylguanosine-3'- phosphorothioate
  modified_base 3: mod_base = OTHER; note = 2'-O-methyluridine-3'-phosphorothioate
  modified_base 4: mod_base = OTHER; note = 2'-O-methylguanosine-3'- phosphorothioate
  modified_base 5: mod_base = OTHER; note = 2'-O-methylcytidine-3'- phosphorothioate
  modified_base 6: mod_base = OTHER; note = 2'-deoxyadenosine-3'-phosphorothioate
  modified_base 7: mod_base = OTHER; note = 2'-deoxyguanosine-3'-phosphorothioate
  modified_base 8: mod_base = OTHER; note = 2'-deoxyguanosine-3'-phosphorothioate
  modified_base 9: mod_base = OTHER; note = 5'-methyl-deoxycytidine-3'-phosphorothioate
  modified_base 10: mod_base = OTHER; note = 5'-methyl-deoxycytidine-3'-phosphorothioate
  modified_base 11: mod_base = OTHER; note = 2'-deoxythymidine-3'-phosphorothioate
  modified_base 12: mod_base = OTHER; note = 2'-deoxyguanosine-3'-phosphorothioate
  modified_base 13: mod_base = OTHER; note = 2'-deoxyguanosine-3'-phosphorothioate
  modified_base 14: mod_base = OTHER; note = 2'-deoxyguanosine-3'-phosphorothioate
  modified_base 15: mod_base = OTHER; note = 2'-deoxyguanosine-3'-phosphorothioate
  modified_base 16: mod_base = OTHER; note = 2'-O-methylcytidine-3'- phosphorothioate
  modified_base 17: mod_base = OTHER; note = 2'-O-methyluridine-3'-phosphorothioate
  modified_base 18: mod_base = OTHER; note = 2'-O-methylguanosine-3'- phosphorothioate
  modified_base 19: mod_base = OTHER; note = 2'-O-methyluridine-3'-phosphorothioate
  modified_base 20: mod_base = OTHER; note = 2'-O-methylguanosine-3'-phosphate
  misc_feature 1..5: note = RNA
  misc_feature 6..15: note = DNA
  misc_feature 16..20: note = RNA
ggtgcaggcctggggctgtg

SEQ ID NO: 113 - DNA, 20 bp, synthetic construct
  source 1..20: mol_type = other DNA; note = Description of Artificial Sequence: Synthetic oligonucleotide; note = Description of Combined DNA/RNA Molecule: Synthetic oligonucleotide
  modified_base 1: mod_base = OTHER; note = 2'-O-methyladenosine-3'- phosphorothioate
  modified_base 2: mod_base = OTHER; note = 2'-O-methyladenosine-3'- phosphorothioate
  modified_base 3: mod_base = OTHER; note = 2'-O-methylcytidine-3'- phosphorothioate
  modified_base 4: mod_base = OTHER; note = 2'-O-methylguanosine-3'- phosphorothioate
  modified_base 5: mod_base = OTHER; note = 2'-O-methylguanosine-3'- phosphorothioate
  modified_base 6: mod_base = OTHER; note = 5'-methyl-deoxycytidine-3'-phosphorothioate
  modified_base 7: mod_base = OTHER; note = 2'-deoxythymidine-3'-phosphorothioate
  modified_base 8: mod_base = OTHER; note = 2'-deoxyguanosine-3'-phosphorothioate
  modified_base 9: mod_base = OTHER; note = 5'-methyl-deoxycytidine-3'-phosphorothioate
  modified_base 10: mod_base = OTHER; note = 2'-deoxythymidine-3'-phosphorothioate
  modified_base 11: mod_base = OTHER; note = 2'-deoxythymidine-3'-phosphorothioate
  modified_base 12: mod_base = OTHER; note = 5'-methyl-deoxycytidine-3'-phosphorothioate
  modified_base 13: mod_base = OTHER; note = 2'-deoxyadenosine-3'-phosphorothioate
  modified_base 14: mod_base = OTHER; note = 2'-deoxyguanosine-3'-phosphorothioate
  modified_base 15: mod_base = OTHER; note = 2'-deoxyguanosine-3'-phosphorothioate
  modified_base 16: mod_base = OTHER; note = 2'-O-methyluridine-3'-phosphorothioate
  modified_base 17: mod_base = OTHER; note = 2'-O-methylguanosine-3'- phosphorothioate
  modified_base 18: mod_base = OTHER; note = 2'-O-methylcytidine-3'- phosphorothioate
  modified_base 19: mod_base = OTHER; note = 2'-O-methyladenosine-3'- phosphorothioate
  modified_base 20: mod_base = OTHER; note = 2'-O-methylguanosine-3'-phosphate
  misc_feature 1..5: note = RNA
  misc_feature 6..15: note = DNA
  misc_feature 16..20: note = RNA
aacggctgcttcaggtgcag

SEQ ID NO: 114 - DNA, 20 bp, synthetic construct
  source 1..20: mol_type = other DNA; note = Description of Artificial Sequence: Synthetic oligonucleotide; note = Description of Combined DNA/RNA Molecule: Synthetic oligonucleotide
  modified_base 1: mod_base = OTHER; note = 2'-O-methylguanosine-3'- phosphorothioate
  modified_base 2: mod_base = OTHER; note = 2'-O-methylcytidine-3'- phosphorothioate
  modified_base 3: mod_base = OTHER; note = 2'-O-methylcytidine-3'- phosphorothioate
  modified_base 4: mod_base = OTHER; note = 2'-O-methylcytidine-3'- phosphorothioate
  modified_base 5: mod_base = OTHER; note = 2'-O-methyluridine-3'-phosphorothioate
  modified_base 6: mod_base = OTHER; note = 2'-deoxyguanosine-3'-phosphorothioate
  modified_base 7: mod_base = OTHER; note = 5'-methyl-deoxycytidine-3'-phosphorothioate
  modified_base 8: mod_base = OTHER; note = 2'-deoxyadenosine-3'-phosphorothioate
  modified_base 9: mod_base = OTHER; note = 5'-methyl-deoxycytidine-3'-phosphorothioate
  modified_base 10: mod_base = OTHER; note = 2'-deoxyadenosine-3'-phosphorothioate
  modified_base 11: mod_base = OTHER; note = 2'-deoxyadenosine-3'-phosphorothioate
  modified_base 12: mod_base = OTHER; note = 2'-deoxyadenosine-3'-phosphorothioate
  modified_base 13: mod_base = OTHER; note = 5'-methyl-deoxycytidine-3'-phosphorothioate
  modified_base 14: mod_base = OTHER; note = 2'-deoxyguanosine-3'-phosphorothioate
  modified_base 15: mod_base = OTHER; note = 2'-deoxyguanosine-3'-phosphorothioate
  modified_base 16: mod_base = OTHER; note = 2'-O-methylcytidine-3'- phosphorothioate
  modified_base 17: mod_base = OTHER; note = 2'-O-methyluridine-3'-phosphorothioate
  modified_base 18: mod_base = OTHER; note = 2'-O-methylguanosine-3'- phosphorothioate
  modified_base 19: mod_base = OTHER; note = 2'-O-methylcytidine-3'- phosphorothioate
  modified_base 20: mod_base = OTHER; note = 2'-O-methyluridine-3'-phosphate
  misc_feature 1..5: note = RNA
  misc_feature 6..15: note = DNA
  misc_feature 16..20: note = RNA
gccctgcacaaacggctgct

SEQ ID NO: 115 - DNA, 20 bp, synthetic construct
  source 1..20: mol_type = other DNA; note = Description of Artificial Sequence: Synthetic oligonucleotide; note = Description of Combined DNA/RNA Molecule: Synthetic oligonucleotide
  modified_base 1: mod_base = OTHER; note = 2'-O-methyladenosine-3'- phosphorothioate
  modified_base 2: mod_base = OTHER; note = 2'-O-methyluridine-3'-phosphorothioate
  modified_base 3: mod_base = OTHER; note = 2'-O-methyladenosine-3'- phosphorothioate
  modified_base 4: mod_base = OTHER; note = 2'-O-methylguanosine-3'- phosphorothioate
  modified_base 5: mod_base = OTHER; note = 2'-O-methyladenosine-3'- phosphorothioate
  modified_base 6: mod_base = OTHER; note = 2'-deoxyguanosine-3'-phosphorothioate
  modified_base 7: mod_base = OTHER; note = 2'-deoxyadenosine-3'-phosphorothioate
  modified_base 8: mod_base = OTHER; note = 2'-deoxyguanosine-3'-phosphorothioate
  modified_base 9: mod_base = OTHER; note = 5'-methyl-deoxycytidine-3'-phosphorothioate
  modified_base 10: mod_base = OTHER; note = 5'-methyl-deoxycytidine-3'-phosphorothioate
  modified_base 11: mod_base = OTHER; note = 2'-deoxyadenosine-3'-phosphorothioate
  modified_base 12: mod_base = OTHER; note = 2'-deoxyguanosine-3'-phosphorothioate
  modified_base 13: mod_base = OTHER; note = 2'-deoxyguanosine-3'-phosphorothioate
  modified_base 14: mod_base = OTHER; note = 5'-methyl-deoxycytidine-3'-phosphorothioate
  modified_base 15: mod_base = OTHER; note = 5'-methyl-deoxycytidine-3'-phosphorothioate
  modified_base 16: mod_base = OTHER; note = 2'-O-methylcytidine-3'- phosphorothioate
  modified_base 17: mod_base = OTHER; note = 2'-O-methyluridine-3'-phosphorothioate
  modified_base 18: mod_base = OTHER; note = 2'-O-methylguanosine-3'- phosphorothioate
  modified_base 19: mod_base = OTHER; note = 2'-O-methylcytidine-3'- phosphorothioate
  modified_base 20: mod_base = OTHER; note = 2'-O-methyladenosine-3'-phosphate
  misc_feature 1..5: note = RNA
  misc_feature 6..15: note = DNA
  misc_feature 16..20: note = RNA
atagagagccaggccctgca

SEQ ID NO: 116 - DNA, 20 bp, synthetic construct
  source 1..20: mol_type = other DNA; note = Description of Artificial Sequence: Synthetic oligonucleotide; note = Description of Combined DNA/RNA Molecule: Synthetic oligonucleotide
  modified_base 1: mod_base = OTHER; note = 2'-O-methylcytidine-3'- phosphorothioate
  modified_base 2: mod_base = OTHER; note = 2'-O-methyladenosine-3'- phosphorothioate
  modified_base 3: mod_base = OTHER; note = 2'-O-methylcytidine-3'- phosphorothioate
  modified_base 4: mod_base = OTHER; note = 2'-O-methyladenosine-3'- phosphorothioate
  modified_base 5: mod_base = OTHER; note = 2'-O-methylguanosine-3'- phosphorothioate
  modified_base 6: mod_base = OTHER; note = 2'-deoxyguanosine-3'-phosphorothioate
  modified_base 7: mod_base = OTHER; note = 2'-deoxyguanosine-3'-phosphorothioate
  modified_base 8: mod_base = OTHER; note = 2'-deoxyguanosine-3'-phosphorothioate
  modified_base 9: mod_base = OTHER; note = 2'-deoxythymidine-3'-phosphorothioate
  modified_base 10: mod_base = OTHER; note = 2'-deoxyadenosine-3'-phosphorothioate
  modified_base 11: mod_base = OTHER; note = 2'-deoxythymidine-3'-phosphorothioate
  modified_base 12: mod_base = OTHER; note = 2'-deoxyadenosine-3'-phosphorothioate
  modified_base 13: mod_base = OTHER; note = 2'-deoxyguanosine-3'-phosphorothioate
  modified_base 14: mod_base = OTHER; note = 2'-deoxyadenosine-3'-phosphorothioate
  modified_base 15: mod_base = OTHER; note = 2'-deoxyguanosine-3'-phosphorothioate
  modified_base 16: mod_base = OTHER; note = 2'-O-methyladenosine-3'- phosphorothioate
  modified_base 17: mod_base = OTHER; note = 2'-O-methylguanosine-3'- phosphorothioate
  modified_base 18: mod_base = OTHER; note = 2'-O-methylcytidine-3'- phosphorothioate
  modified_base 19: mod_base = OTHER; note = 2'-O-methylcytidine-3'- phosphorothioate
  modified_base 20: mod_base = OTHER; note = 2'-O-methyladenosine-3'-phosphate
  misc_feature 1..5: note = RNA
  misc_feature 6..15: note = DNA
  misc_feature 16..20: note = RNA
cacaggggtatagagagcca

SEQ ID NO: 117 - DNA, 20 bp, synthetic construct
  source 1..20: mol_type = other DNA; note = Description of Artificial Sequence: Synthetic oligonucleotide; note = Description of Combined DNA/RNA Molecule: Synthetic oligonucleotide
  modified_base 1: mod_base = OTHER; note = 2'-O-methylcytidine-3'- phosphorothioate
  modified_base 2: mod_base = OTHER; note = 2'-O-methylguanosine-3'- phosphorothioate
  modified_base 3: mod_base = OTHER; note = 2'-O-methyluridine-3'-phosphorothioate
  modified_base 4: mod_base = OTHER; note = 2'-O-methylguanosine-3'- phosphorothioate
  modified_base 5: mod_base = OTHER; note = 2'-O-methylguanosine-3'- phosphorothioate
  modified_base 6: mod_base = OTHER; note = 2'-deoxyguanosine-3'-phosphorothioate
  modified_base 7: mod_base = OTHER; note = 2'-deoxyadenosine-3'-phosphorothioate
  modified_base 8: mod_base = OTHER; note = 2'-deoxyguanosine-3'-phosphorothioate
  modified_base 9: mod_base = OTHER; note = 2'-deoxyguanosine-3'-phosphorothioate
  modified_base 10: mod_base = OTHER; note = 2'-deoxyadenosine-3'-phosphorothioate
  modified_base 11: mod_base = OTHER; note = 5'-methyl-deoxycytidine-3'-phosphorothioate
  modified_base 12: mod_base = OTHER; note = 5'-methyl-deoxycytidine-3'-phosphorothioate
  modified_base 13: mod_base = OTHER; note = 2'-deoxyadenosine-3'-phosphorothioate
  modified_base 14: mod_base = OTHER; note = 5'-methyl-deoxycytidine-3'-phosphorothioate
  modified_base 15: mod_base = OTHER; note = 2'-deoxyadenosine-3'-phosphorothioate
  modified_base 16: mod_base = OTHER; note = 2'-O-methylguanosine-3'- phosphorothioate
  modified_base 17: mod_base = OTHER; note = 2'-O-methylguanosine-3'- phosphorothioate
  modified_base 18: mod_base = OTHER; note = 2'-O-methylguanosine-3'- phosphorothioate
  modified_base 19: mod_base = OTHER; note = 2'-O-methylguanosine-3'- phosphorothioate
  modified_base 20: mod_base = OTHER; note = 2'-O-methyluridine-3'-phosphate
  misc_feature 1..5: note = RNA
  misc_feature 6..15: note = DNA
  misc_feature 16..20: note = RNA
cgtgggaggaccacaggggt

SEQ ID NO: 118 - DNA, 20 bp, synthetic construct
  source 1..20: mol_type = other DNA; note = Description of Artificial Sequence: Synthetic oligonucleotide; note = Description of Combined DNA/RNA Molecule: Synthetic oligonucleotide
  modified_base 1: mod_base = OTHER; note = 2'-O-methylguanosine-3'- phosphorothioate
  modified_base 2: mod_base = OTHER; note = 2'-O-methyladenosine-3'- phosphorothioate
  modified_base 3: mod_base = OTHER; note = 2'-O-methyladenosine-3'- phosphorothioate
  modified_base 4: mod_base = OTHER; note = 2'-O-methylguanosine-3'- phosphorothioate
  modified_base 5: mod_base = OTHER; note = 2'-O-methyluridine-3'-phosphorothioate
  modified_base 6: mod_base = OTHER; note = 5'-methyl-deoxycytidine-3'-phosphorothioate
  modified_base 7: mod_base = OTHER; note = 5'-methyl-deoxycytidine-3'-phosphorothioate
  modified_base 8: mod_base = OTHER; note = 2'-deoxyadenosine-3'-phosphorothioate
  modified_base 9: mod_base = OTHER; note = 2'-deoxyguanosine-3'-phosphorothioate
  modified_base 10: mod_base = OTHER; note = 2'-deoxyadenosine-3'-phosphorothioate
  modified_base 11: mod_base = OTHER; note = 2'-deoxyguanosine-3'-phosphorothioate
  modified_base 12: mod_base = OTHER; note = 2'-deoxyadenosine-3'-phosphorothioate
  modified_base 13: mod_base = OTHER; note = 2'-deoxyguanosine-3'-phosphorothioate
  modified_base 14: mod_base = OTHER; note = 5'-methyl-deoxycytidine-3'-phosphorothioate
  modified_base 15: mod_base = OTHER; note = 2'-deoxyguanosine-3'-phosphorothioate
  modified_base 16: mod_base = OTHER; note = 2'-O-methyluridine-3'-phosphorothioate
  modified_base 17: mod_base = OTHER; note = 2'-O-methylguanosine-3'- phosphorothioate
  modified_base 18: mod_base = OTHER; note = 2'-O-methylguanosine-3'- phosphorothioate
  modified_base 19: mod_base = OTHER; note = 2'-O-methylguanosine-3'- phosphorothioate
  modified_base 20: mod_base = OTHER; note = 2'-O-methyladenosine-3'-phosphate
  misc_feature 1..5: note = RNA
  misc_feature 6..15: note = DNA
  misc_feature 16..20: note = RNA
gaagtccagagagcgtggga

SEQ ID NO: 119 - DNA, 20 bp, synthetic construct
  source 1..20: mol_type = other DNA; note = Description of Artificial Sequence: Synthetic oligonucleotide; note = Description of Combined DNA/RNA Molecule: Synthetic oligonucleotide
  modified_base 1: mod_base = OTHER; note = 2'-O-methyluridine-3'-phosphorothioate
  modified_base 2: mod_base = OTHER; note = 2'-O-methylcytidine-3'- phosphorothioate
  modified_base 3: mod_base = OTHER; note = 2'-O-methylcytidine-3'- phosphorothioate
  modified_base 4: mod_base = OTHER; note = 2'-O-methyladenosine-3'- phosphorothioate
  modified_base 5: mod_base = OTHER; note = 2'-O-methylguanosine-3'- phosphorothioate
  modified_base 6: mod_base = OTHER; note = 2'-deoxythymidine-3'-phosphorothioate
  modified_base 7: mod_base = OTHER; note = 2'-deoxythymidine-3'-phosphorothioate
  modified_base 8: mod_base = OTHER; note = 5'-methyl-deoxycytidine-3'-phosphorothioate
  modified_base 9: mod_base = OTHER; note = 2'-deoxythymidine-3'-phosphorothioate
  modified_base 10: mod_base = OTHER; note = 2'-deoxyguanosine-3'-phosphorothioate
  modified_base 11: mod_base = OTHER; note = 2'-deoxythymidine-3'-phosphorothioate
  modified_base 12: mod_base = OTHER; note = 2'-deoxyguanosine-3'-phosphorothioate
  modified_base 13: mod_base = OTHER; note = 2'-deoxyadenosine-3'-phosphorothioate
  modified_base 14: mod_base = OTHER; note = 2'-deoxyadenosine-3'-phosphorothioate
  modified_base 15: mod_base = OTHER; note = 2'-deoxyguanosine-3'-phosphorothioate
  modified_base 16: mod_base = OTHER; note = 2'-O-methyluridine-3'-phosphorothioate
  modified_base 17: mod_base = OTHER; note = 2'-O-methylcytidine-3'- phosphorothioate
  modified_base 18: mod_base = OTHER; note = 2'-O-methylcytidine-3'- phosphorothioate
  modified_base 19: mod_base = OTHER; note = 2'-O-methyladenosine-3'- phosphorothioate
  modified_base 20: mod_base = OTHER; note = 2'-O-methylguanosine-3'-phosphate
  misc_feature 1..5: note = RNA
  misc_feature 6..15: note = DNA
  misc_feature 16..20: note = RNA
tccagttctgtgaagtccag

SEQ ID NO: 120 - DNA, 20 bp, synthetic construct
  source 1..20: mol_type = other DNA; note = Description of Artificial Sequence: Synthetic oligonucleotide; note = Description of Combined DNA/RNA Molecule: Synthetic oligonucleotide
  modified_base 1: mod_base = OTHER; note = 2'-O-methylcytidine-3'- phosphorothioate
  modified_base 2: mod_base = OTHER; note = 2'-O-methyladenosine-3'- phosphorothioate
  modified_base 3: mod_base = OTHER; note = 2'-O-methylguanosine-3'- phosphorothioate
  modified_base 4: mod_base = OTHER; note = 2'-O-methylcytidine-3'- phosphorothioate
  modified_base 5: mod_base = OTHER; note = 2'-O-methyladenosine-3'- phosphorothioate
  modified_base 6: mod_base = OTHER; note = 2'-deoxyguanosine-3'-phosphorothioate
  modified_base 7: mod_base = OTHER; note = 5'-methyl-deoxycytidine-3'-phosphorothioate
  modified_base 8: mod_base = OTHER; note = 2'-deoxyadenosine-3'-phosphorothioate
  modified_base 9: mod_base = OTHER; note = 2'-deoxyadenosine-3'-phosphorothioate
  modified_base 10: mod_base = OTHER; note = 5'-methyl-deoxycytidine-3'-phosphorothioate
  modified_base 11: mod_base = OTHER; note = 2'-deoxyadenosine-3'-phosphorothioate
  modified_base 12: mod_base = OTHER; note = 2'-deoxythymidine-3'-phosphorothioate
  modified_base 13: mod_base = OTHER; note = 5'-methyl-deoxycytidine-3'-phosphorothioate
  modified_base 14: mod_base = OTHER; note = 5'-methyl-deoxycytidine-3'-phosphorothioate
  modified_base 15: mod_base = OTHER; note = 2'-deoxyadenosine-3'-phosphorothioate
  modified_base 16: mod_base = OTHER; note = 2'-O-methylguanosine-3'- phosphorothioate
  modified_base 17: mod_base = OTHER; note = 2'-O-methyluridine-3'-phosphorothioate
  modified_base 18: mod_base = OTHER; note = 2'-O-methyluridine-3'-phosphorothioate
  modified_base 19: mod_base = OTHER; note = 2'-O-methylcytidine-3'- phosphorothioate
  modified_base 20: mod_base = OTHER; note = 2'-O-methyluridine-3'-phosphate
  misc_feature 1..5: note = RNA
  misc_feature 6..15: note = DNA
  misc_feature 16..20: note = RNA
cagcagcaacatccagttct

SEQ ID NO: 121 - DNA, 20 bp, synthetic construct
  source 1..20: mol_type = other DNA; note = Description of Artificial Sequence: Synthetic oligonucleotide; note = Description of Combined DNA/RNA Molecule: Synthetic oligonucleotide
  modified_base 1: mod_base = OTHER; note = 2'-O-methylguanosine-3'- phosphorothioate
  modified_base 2: mod_base = OTHER; note = 2'-O-methyluridine-3'-phosphorothioate
  modified_base 3: mod_base = OTHER; note = 2'-O-methylcytidine-3'- phosphorothioate
  modified_base 4: mod_base = OTHER; note = 2'-O-methyladenosine-3'- phosphorothioate
  modified_base 5: mod_base = OTHER; note = 2'-O-methyladenosine-3'- phosphorothioate
  modified_base 6: mod_base = OTHER; note = 2'-deoxythymidine-3'-phosphorothioate
  modified_base 7: mod_base = OTHER; note = 5'-methyl-deoxycytidine-3'-phosphorothioate
  modified_base 8: mod_base = OTHER; note = 2'-deoxythymidine-3'-phosphorothioate
  modified_base 9: mod_base = OTHER; note = 2'-deoxythymidine-3'-phosphorothioate
  modified_base 10: mod_base = OTHER; note = 5'-methyl-deoxycytidine-3'-phosphorothioate
  modified_base 11: mod_base = OTHER; note = 2'-deoxythymidine-3'-phosphorothioate
  modified_base 12: mod_base = OTHER; note = 5'-methyl-deoxycytidine-3'-phosphorothioate
  modified_base 13: mod_base = OTHER; note = 2'-deoxyadenosine-3'-phosphorothioate
  modified_base 14: mod_base = OTHER; note = 2'-deoxyguanosine-3'-phosphorothioate
  modified_base 15: mod_base = OTHER; note = 5'-methyl-deoxycytidine-3'-phosphorothioate
  modified_base 16: mod_base = OTHER; note = 2'-O-methyladenosine-3'- phosphorothioate
  modified_base 17: mod_base = OTHER; note = 2'-O-methylguanosine-3'- phosphorothioate
  modified_base 18: mod_base = OTHER; note = 2'-O-methylcytidine-3'- phosphorothioate
  modified_base 19: mod_base = OTHER; note = 2'-O-methyladenosine-3'- phosphorothioate
  modified_base 20: mod_base = OTHER; note = 2'-O-methyladenosine-3'-phosphate
  misc_feature 1..5: note = RNA
  misc_feature 6..15: note = DNA
  misc_feature 16..20: note = RNA
gtcaatcttctcagcagcaa

SEQ ID NO: 122 - DNA, 20 bp, synthetic construct
  source 1..20: mol_type = other DNA; note = Description of Artificial Sequence: Synthetic oligonucleotide; note = Description of Combined DNA/RNA Molecule: Synthetic oligonucleotide
  modified_base 1: mod_base = OTHER; note = 2'-O-methylcytidine-3'- phosphorothioate
  modified_base 2: mod_base = OTHER; note = 2'-O-methyladenosine-3'- phosphorothioate
  modified_base 3: mod_base = OTHER; note = 2'-O-methyluridine-3'-phosphorothioate
  modified_base 4: mod_base = OTHER; note = 2'-O-methylguanosine-3'- phosphorothioate
  modified_base 5: mod_base = OTHER; note = 2'-O-methyladenosine-3'- phosphorothioate
  modified_base 6: mod_base = OTHER; note = 2'-deoxyadenosine-3'-phosphorothioate
  modified_base 7: mod_base = OTHER; note = 5'-methyl-deoxycytidine-3'-phosphorothioate
  modified_base 8: mod_base = OTHER; note = 5'-methyl-deoxycytidine-3'-phosphorothioate
  modified_base 9: mod_base = OTHER; note = 2'-deoxythymidine-3'-phosphorothioate
  modified_base 10: mod_base = OTHER; note = 2'-deoxyguanosine-3'-phosphorothioate
  modified_base 11: mod_base = OTHER; note = 2'-deoxythymidine-3'-phosphorothioate
  modified_base 12: mod_base = OTHER; note = 5'-methyl-deoxycytidine-3'-phosphorothioate
  modified_base 13: mod_base = OTHER; note = 2'-deoxyadenosine-3'-phosphorothioate
  modified_base 14: mod_base = OTHER; note = 2'-deoxyadenosine-3'-phosphorothioate
  modified_base 15: mod_base = OTHER; note = 2'-deoxythymidine-3'-phosphorothioate
  modified_base 16: mod_base = OTHER; note = 2'-O-methylcytidine-3'- phosphorothioate
  modified_base 17: mod_base = OTHER; note = 2'-O-methyluridine-3'-phosphorothioate
  modified_base 18: mod_base = OTHER; note = 2'-O-methyluridine-3'-phosphorothioate
  modified_base 19: mod_base = OTHER; note = 2'-O-methylcytidine-3'- phosphorothioate
  modified_base 20: mod_base = OTHER; note = 2'-O-methyluridine-3'-phosphate
  misc_feature 1..5: note = RNA
  misc_feature 6..15: note = DNA
  misc_feature 16..20: note = RNA
catgaacctgtcaatcttct

SEQ ID NO: 123 - DNA, 20 bp, synthetic construct
  source 1..20: mol_type = other DNA; note = Description of Artificial Sequence: Synthetic oligonucleotide; note = Description of Combined DNA/RNA Molecule: Synthetic oligonucleotide
  modified_base 1: mod_base = OTHER; note = 2'-O-methylguanosine-3'- phosphorothioate
  modified_base 2: mod_base = OTHER; note = 2'-O-methyluridine-3'-phosphorothioate
  modified_base 3: mod_base = OTHER; note = 2'-O-methylcytidine-3'- phosphorothioate
  modified_base 4: mod_base = OTHER; note = 2'-O-methyladenosine-3'- phosphorothioate
  modified_base 5: mod_base = OTHER; note = 2'-O-methylcytidine-3'- phosphorothioate
  modified_base 6: mod_base = OTHER; note = 2'-deoxyadenosine-3'-phosphorothioate
  modified_base 7: mod_base = OTHER; note = 2'-deoxyguanosine-3'-phosphorothioate
  modified_base 8: mod_base = OTHER; note = 5'-methyl-deoxycytidine-3'-phosphorothioate
  modified_base 9: mod_base = OTHER; note = 5'-methyl-deoxycytidine-3'-phosphorothioate
  modified_base 10: mod_base = OTHER; note = 2'-deoxythymidine-3'-phosphorothioate
  modified_base 11: mod_base = OTHER; note = 2'-deoxyguanosine-3'-phosphorothioate
  modified_base 12: mod_base = OTHER; note = 5'-methyl-deoxycytidine-3'-phosphorothioate
  modified_base 13: mod_base = OTHER; note = 2'-deoxyadenosine-3'-phosphorothioate
  modified_base 14: mod_base = OTHER; note = 2'-deoxythymidine-3'-phosphorothioate
  modified_base 15: mod_base = OTHER; note = 2'-deoxyguanosine-3'-phosphorothioate
  modified_base 16: mod_base = OTHER; note = 2'-O-methyladenosine-3'- phosphorothioate
  modified_base 17: mod_base = OTHER; note = 2'-O-methyladenosine-3'- phosphorothioate
  modified_base 18: mod_base = OTHER; note = 2'-O-methylcytidine-3'- phosphorothioate
  modified_base 19: mod_base = OTHER; note = 2'-O-methylcytidine-3'- phosphorothioate
  modified_base 20: mod_base = OTHER; note = 2'-O-methyluridine-3'-phosphate
  misc_feature 1..5: note = RNA
  misc_feature 6..15: note = DNA
  misc_feature 16..20: note = RNA
gtcacagcctgcatgaacct

SEQ ID NO: 124 - DNA, 20 bp, synthetic construct
  source 1..20: mol_type = other DNA; note = Description of Artificial Sequence: Synthetic oligonucleotide; note = Description of Combined DNA/RNA Molecule: Synthetic oligonucleotide
  modified_base 1: mod_base = OTHER; note = 2'-O-methylguanosine-3'- phosphorothioate
  modified_base 2: mod_base = OTHER; note = 2'-O-methyluridine-3'-phosphorothioate
  modified_base 3: mod_base = OTHER; note = 2'-O-methylcytidine-3'- phosphorothioate
  modified_base 4: mod_base = OTHER; note = 2'-O-methyluridine-3'-phosphorothioate
  modified_base 5: mod_base = OTHER; note = 2'-O-methyluridine-3'-phosphorothioate
  modified_base 6: mod_base = OTHER; note = 5'-methyl-deoxycytidine-3'-phosphorothioate
  modified_base 7: mod_base = OTHER; note = 5'-methyl-deoxycytidine-3'-phosphorothioate
  modified_base 8: mod_base = OTHER; note = 2'-deoxyadenosine-3'-phosphorothioate
  modified_base 9: mod_base = OTHER; note = 2'-deoxythymidine-3'-phosphorothioate
  modified_base 10: mod_base = OTHER; note = 5'-methyl-deoxycytidine-3'-phosphorothioate
  modified_base 11: mod_base = OTHER; note = 5'-methyl-deoxycytidine-3'-phosphorothioate
  modified_base 12: mod_base = OTHER; note = 2'-deoxythymidine-3'-phosphorothioate
  modified_base 13: mod_base = OTHER; note = 2'-deoxyguanosine-3'-phosphorothioate
  modified_base 14: mod_base = OTHER; note = 2'-deoxythymidine-3'-phosphorothioate
  modified_base 15: mod_base = OTHER; note = 5'-methyl-deoxycytidine-3'-phosphorothioate
  modified_base 16: mod_base = OTHER; note = 2'-O-methyladenosine-3'- phosphorothioate
  modified_base 17: mod_base = OTHER; note = 2'-O-methylcytidine-3'- phosphorothioate
  modified_base 18: mod_base = OTHER; note = 2'-O-methyladenosine-3'- phosphorothioate
  modified_base 19: mod_base = OTHER; note = 2'-O-methylguanosine-3'- phosphorothioate
  modified_base 20: mod_base = OTHER; note = 2'-O-methylcytidine-3'-phosphate
  misc_feature 1..5: note = RNA
  misc_feature 6..15: note = DNA
  misc_feature 16..20: note = RNA
gtcttccatcctgtcacagc

SEQ ID NO: 125 - DNA, 20 bp, synthetic construct
  source 1..20: mol_type = other DNA; note = Description of Artificial Sequence: Synthetic oligonucleotide; note = Description of Combined DNA/RNA Molecule: Synthetic oligonucleotide
  modified_base 1: mod_base = OTHER; note = 2'-O-methyladenosine-3'- phosphorothioate
  modified_base 2: mod_base = OTHER; note = 2'-O-methylguanosine-3'- phosphorothioate
  modified_base 3: mod_base = OTHER; note = 2'-O-methylguanosine-3'- phosphorothioate
  modified_base 4: mod_base = OTHER; note = 2'-O-methylguanosine-3'- phosphorothioate
  modified_base 5: mod_base = OTHER; note = 2'-O-methyladenosine-3'- phosphorothioate
  modified_base 6: mod_base = OTHER; note = 2'-deoxyguanosine-3'-phosphorothioate
  modified_base 7: mod_base = OTHER; note = 5'-methyl-deoxycytidine-3'-phosphorothioate
  modified_base 8: mod_base = OTHER; note = 2'-deoxyadenosine-3'-phosphorothioate
  modified_base 9: mod_base = OTHER; note = 2'-deoxyguanosine-3'-phosphorothioate
  modified_base 10: mod_base = OTHER; note = 5'-methyl-deoxycytidine-3'-phosphorothioate
  modified_base 11: mod_base = OTHER; note = 5'-methyl-deoxycytidine-3'-phosphorothioate
  modified_base 12: mod_base = OTHER; note = 2'-deoxyadenosine-3'-phosphorothioate
  modified_base 13: mod_base = OTHER; note = 2'-deoxyguanosine-3'-phosphorothioate
  modified_base 14: mod_base = OTHER; note = 2'-deoxythymidine-3'-phosphorothioate
  modified_base 15: mod_base = OTHER; note = 5'-methyl-deoxycytidine-3'-phosphorothioate
  modified_base 16: mod_base = OTHER; note = 2'-O-methyluridine-3'-phosphorothioate
  modified_base 17: mod_base = OTHER; note = 2'-O-methyluridine-3'-phosphorothioate
  modified_base 18: mod_base = OTHER; note = 2'-O-methylcytidine-3'- phosphorothioate
  modified_base 19: mod_base = OTHER; note = 2'-O-methylcytidine-3'- phosphorothioate
  modified_base 20: mod_base = OTHER; note = 2'-O-methyladenosine-3'-phosphate
  misc_feature 1..5: note = RNA
  misc_feature 6..15: note = DNA
  misc_feature 16..20: note = RNA
agggagcagccagtcttcca

SEQ ID NO: 126 - DNA, 20 bp, synthetic construct
  source 1..20: mol_type = other DNA; note = Description of Artificial Sequence: Synthetic oligonucleotide; note = Description of Combined DNA/RNA Molecule: Synthetic oligonucleotide
  modified_base 1: mod_base = OTHER; note = 2'-O-methyluridine-3'-phosphorothioate
  modified_base 2: mod_base = OTHER; note = 2'-O-methylguanosine-3'- phosphorothioate
  modified_base 3: mod_base = OTHER; note = 2'-O-methylguanosine-3'- phosphorothioate
  modified_base 4: mod_base = OTHER; note = 2'-O-methylcytidine-3'- phosphorothioate
  modified_base 5: mod_base = OTHER; note = 2'-O-methyluridine-3'-phosphorothioate
  modified_base 6: mod_base = OTHER; note = 5'-methyl-deoxycytidine-3'-phosphorothioate
  modified_base 7: mod_base = OTHER; note = 5'-methyl-deoxycytidine-3'-phosphorothioate
  modified_base 8: mod_base = OTHER; note = 5'-methyl-deoxycytidine-3'-phosphorothioate
  modified_base 9: mod_base = OTHER; note = 2'-deoxyadenosine-3'-phosphorothioate
  modified_base 10: mod_base = OTHER; note = 2'-deoxythymidine-3'-phosphorothioate
  modified_base 11: mod_base = OTHER; note = 5'-methyl-deoxycytidine-3'-phosphorothioate
  modified_base 12: mod_base = OTHER; note = 2'-deoxyadenosine-3'-phosphorothioate
  modified_base 13: mod_base = OTHER; note = 2'-deoxyguanosine-3'-phosphorothioate
  modified_base 14: mod_base = OTHER; note = 2'-deoxyguanosine-3'-phosphorothioate
  modified_base 15: mod_base = OTHER; note = 2'-deoxyguanosine-3'-phosphorothioate
  modified_base 16: mod_base = OTHER; note = 2'-O-methyladenosine-3'- phosphorothioate
  modified_base 17: mod_base = OTHER; note = 2'-O-methylguanosine-3'- phosphorothioate
  modified_base 18: mod_base = OTHER; note = 2'-O-methylcytidine-3'- phosphorothioate
  modified_base 19: mod_base = OTHER; note = 2'-O-methyladenosine-3'- phosphorothioate
  modified_base 20: mod_base = OTHER; note = 2'-O-methylguanosine-3'-phosphate
  misc_feature 1..5: note = RNA
  misc_feature 6..15: note = DNA
  misc_feature 16..20: note = RNA
tggctcccatcagggagcag

SEQ ID NO: 127 - DNA, 20 bp, synthetic construct
  source 1..20: mol_type = other DNA; note = Description of Artificial Sequence: Synthetic oligonucleotide; note = Description of Combined DNA/RNA Molecule: Synthetic oligonucleotide
  modified_base 1: mod_base = OTHER; note = 2'-O-methylcytidine-3'- phosphorothioate
  modified_base 2: mod_base = OTHER; note = 2'-O-methyluridine-3'-phosphorothioate
  modified_base 3: mod_base = OTHER; note = 2'-O-methylguanosine-3'- phosphorothioate
  modified_base 4: mod_base = OTHER; note = 2'-O-methyluridine-3'-phosphorothioate
  modified_base 5: mod_base = OTHER; note = 2'-O-methylcytidine-3'- phosphorothioate
  modified_base 6: mod_base = OTHER; note = 5'-methyl-deoxycytidine-3'-phosphorothioate
  modified_base 7: mod_base = OTHER; note = 2'-deoxyadenosine-3'-phosphorothioate
  modified_base 8: mod_base = OTHER; note = 5'-methyl-deoxycytidine-3'-phosphorothioate
  modified_base 9: mod_base = OTHER; note = 2'-deoxyadenosine-3'-phosphorothioate
  modified_base 10: mod_base = OTHER; note = 5'-methyl-deoxycytidine-3'-phosphorothioate
  modified_base 11: mod_base = OTHER; note = 2'-deoxythymidine-3'-phosphorothioate
  modified_base 12: mod_base = OTHER; note = 2'-deoxyguanosine-3'-phosphorothioate
  modified_base 13: mod_base = OTHER; note = 2'-deoxyguanosine-3'-phosphorothioate
  modified_base 14: mod_base = OTHER; note = 5'-methyl-deoxycytidine-3'-phosphorothioate
  modified_base 15: mod_base = OTHER; note = 2'-deoxythymidine-3'-phosphorothioate
  modified_base 16: mod_base = OTHER; note = 2'-O-methylcytidine-3'- phosphorothioate
  modified_base 17: mod_base = OTHER; note = 2'-O-methylcytidine-3'- phosphorothioate
  modified_base 18: mod_base = OTHER; note = 2'-O-methylcytidine-3'- phosphorothioate
  modified_base 19: mod_base = OTHER; note = 2'-O-methyladenosine-3'- phosphorothioate
  modified_base 20: mod_base = OTHER; note = 2'-O-methyluridine-3'-phosphate
  misc_feature 1..5: note = RNA
  misc_feature 6..15: note = DNA
  misc_feature 16..20: note = RNA
ctgtccacactggctcccat

SEQ ID NO: 128 - DNA, 20 bp, synthetic construct
  source 1..20: mol_type = other DNA; note = Description of Artificial Sequence: Synthetic oligonucleotide; note = Description of Combined DNA/RNA Molecule: Synthetic oligonucleotide
  modified_base 1: mod_base = OTHER; note = 2'-O-methyladenosine-3'- phosphorothioate
  modified_base 2: mod_base = OTHER; note = 2'-O-methyladenosine-3'- phosphorothioate
  modified_base 3: mod_base = OTHER; note = 2'-O-methylguanosine-3'- phosphorothioate
  modified_base 4: mod_base = OTHER; note = 2'-O-methylcytidine-3'- phosphorothioate
  modified_base 5: mod_base = OTHER; note = 2'-O-methylcytidine-3'- phosphorothioate
  modified_base 6: mod_base = OTHER; note = 2'-deoxyadenosine-3'-phosphorothioate
  modified_base 7: mod_base = OTHER; note = 2'-deoxyguanosine-3'-phosphorothioate
  modified_base 8: mod_base = OTHER; note = 2'-deoxyguanosine-3'-phosphorothioate
  modified_base 9: mod_base = OTHER; note = 2'-deoxyguanosine-3'-phosphorothioate
  modified_base 10: mod_base = OTHER; note = 2'-deoxythymidine-3'-phosphorothioate
  modified_base 11: mod_base = OTHER; note = 2'-deoxyguanosine-3'-phosphorothioate
  modified_base 12: mod_base = OTHER; note = 5'-methyl-deoxycytidine-3'-phosphorothioate
  modified_base 13: mod_base = OTHER; note = 2'-deoxythymidine-3'-phosphorothioate
  modified_base 14: mod_base = OTHER; note = 2'-deoxyguanosine-3'-phosphorothioate
  modified_base 15: mod_base = OTHER; note = 2'-deoxythymidine-3'-phosphorothioate
  modified_base 16: mod_base = OTHER; note = 2'-O-methylcytidine-3'- phosphorothioate
  modified_base 17: mod_base = OTHER; note = 2'-O-methylcytidine-3'- phosphorothioate
  modified_base 18: mod_base = OTHER; note = 2'-O-methyladenosine-3'- phosphorothioate
  modified_base 19: mod_base = OTHER; note = 2'-O-methylcytidine-3'- phosphorothioate
  modified_base 20: mod_base = OTHER; note = 2'-O-methyladenosine-3'-phosphate
  misc_feature 1..5: note = RNA
  misc_feature 6..15: note = DNA
  misc_feature 16..20: note = RNA
aagccagggtgctgtccaca

SEQ ID NO: 129 - DNA, 20 bp, synthetic construct
  source 1..20: mol_type = other DNA; note = Description of Artificial Sequence: Synthetic oligonucleotide; note = Description of Combined DNA/RNA Molecule: Synthetic oligonucleotide
  modified_base 1: mod_base = OTHER; note = 2'-O-methylcytidine-3'- phosphorothioate
  modified_base 2: mod_base = OTHER; note = 2'-O-methylguanosine-3'- phosphorothioate
  modified_base 3: mod_base = OTHER; note = 2'-O-methyluridine-3'-phosphorothioate
  modified_base 4: mod_base = OTHER; note = 2'-O-methyladenosine-3'- phosphorothioate
  modified_base 5: mod_base = OTHER; note = 2'-O-methylguanosine-3'- phosphorothioate
  modified_base 6: mod_base = OTHER; note = 2'-deoxyguanosine-3'-phosphorothioate
  modified_base 7: mod_base = OTHER; note = 2'-deoxythymidine-3'-phosphorothioate
  modified_base 8: mod_base = OTHER; note = 2'-deoxyguanosine-3'-phosphorothioate
  modified_base 9: mod_base = OTHER; note = 2'-deoxythymidine-3'-phosphorothioate
  modified_base 10: mod_base = OTHER; note = 2'-deoxythymidine-3'-phosphorothioate
  modified_base 11: mod_base = OTHER; note = 2'-deoxyguanosine-3'-phosphorothioate
  modified_base 12: mod_base = OTHER; note = 2'-deoxyadenosine-3'-phosphorothioate
  modified_base 13: mod_base = OTHER; note = 2'-deoxyadenosine-3'-phosphorothioate
  modified_base 14: mod_base = OTHER; note = 2'-deoxyadenosine-3'-phosphorothioate
  modified_base 15: mod_base = OTHER; note = 2'-deoxyguanosine-3'-phosphorothioate
  modified_base 16: mod_base = OTHER; note = 2'-O-methylcytidine-3'- phosphorothioate
  modified_base 17: mod_base = OTHER; note = 2'-O-methylcytidine-3'- phosphorothioate
  modified_base 18: mod_base = OTHER; note = 2'-O-methyladenosine-3'- phosphorothioate
  modified_base 19: mod_base = OTHER; note = 2'-O-methylguanosine-3'- phosphorothioate
  modified_base 20: mod_base = OTHER; note = 2'-O-methylguanosine-3'-phosphate
  misc_feature 1..5: note = RNA
  misc_feature 6..15: note = DNA
  misc_feature 16..20: note = RNA
cgtaggtgttgaaagccagg

SEQ ID NO: 130 - DNA, 20 bp, synthetic construct
  source 1..20: mol_type = other DNA; note = Description of Artificial Sequence: Synthetic oligonucleotide; note = Description of Combined DNA/RNA Molecule: Synthetic oligonucleotide
  modified_base 1: mod_base = OTHER; note = 2'-O-methylguanosine-3'- phosphorothioate
  modified_base 2: mod_base = OTHER; note = 2'-O-methylguanosine-3'- phosphorothioate
  modified_base 3: mod_base = OTHER; note = 2'-O-methyladenosine-3'- phosphorothioate
  modified_base 4: mod_base = OTHER; note = 2'-O-methyladenosine-3'- phosphorothioate
  modified_base 5: mod_base = OTHER; note = 2'-O-methylguanosine-3'- phosphorothioate
  modified_base 6: mod_base = OTHER; note = 2'-deoxythymidine-3'-phosphorothioate
  modified_base 7: mod_base = OTHER; note = 2'-deoxyguanosine-3'-phosphorothioate
  modified_base 8: mod_base = OTHER; note = 2'-deoxyguanosine-3'-phosphorothioate
  modified_base 9: mod_base = OTHER; note = 2'-deoxyadenosine-3'-phosphorothioate
  modified_base 10: mod_base = OTHER; note = 5'-methyl-deoxycytidine-3'-phosphorothioate
  modified_base 11: mod_base = OTHER; note = 2'-deoxyguanosine-3'-phosphorothioate
  modified_base 12: mod_base = OTHER; note = 2'-deoxythymidine-3'-phosphorothioate
  modified_base 13: mod_base = OTHER; note = 2'-deoxyadenosine-3'-phosphorothioate
  modified_base 14: mod_base = OTHER; note = 2'-deoxyguanosine-3'-phosphorothioate
  modified_base 15: mod_base = OTHER; note = 2'-deoxyguanosine-3'-phosphorothioate
  modified_base 16: mod_base = OTHER; note = 2'-O-methyluridine-3'-phosphorothioate
  modified_base 17: mod_base = OTHER; note = 2'-O-methylguanosine-3'- phosphorothioate
  modified_base 18: mod_base = OTHER; note = 2'-O-methyluridine-3'-phosphorothioate
  modified_base 19: mod_base = OTHER; note = 2'-O-methyluridine-3'-phosphorothioate
  modified_base 20: mod_base = OTHER; note = 2'-O-methylguanosine-3'-phosphate
  misc_feature 1..5: note = RNA
  misc_feature 6..15: note = DNA
  misc_feature 16..20: note = RNA
ggaagtggacgtaggtgttg

SEQ ID NO: 131 - DNA, 20 bp, synthetic construct
  source 1..20: mol_type = other DNA; note = Description of Artificial Sequence: Synthetic oligonucleotide; note = Description of Combined DNA/RNA Molecule: Synthetic oligonucleotide
  modified_base 1: mod_base = OTHER; note = 2'-O-methyluridine-3'-phosphorothioate
  modified_base 2: mod_base = OTHER; note = 2'-O-methyluridine-3'-phosphorothioate
  modified_base 3: mod_base = OTHER; note = 2'-O-methylcytidine-3'- phosphorothioate
  modified_base 4: mod_base = OTHER; note = 2'-O-methyladenosine-3'- phosphorothioate
  modified_base 5: mod_base = OTHER; note = 2'-O-methyluridine-3'-phosphorothioate
  modified_base 6: mod_base = OTHER; note = 5'-methyl-deoxycytidine-3'-phosphorothioate
  modified_base 7: mod_base = OTHER; note = 2'-deoxythymidine-3'-phosphorothioate
  modified_base 8: mod_base = OTHER; note = 2'-deoxythymidine-3'-phosphorothioate
  modified_base 9: mod_base = OTHER; note = 5'-methyl-deoxycytidine-3'-phosphorothioate
  modified_base 10: mod_base = OTHER; note = 5'-methyl-deoxycytidine-3'-phosphorothioate
  modified_base 11: mod_base = OTHER; note = 5'-methyl-deoxycytidine-3'-phosphorothioate
  modified_base 12: mod_base = OTHER; note = 2'-deoxythymidine-3'-phosphorothioate
  modified_base 13: mod_base = OTHER; note = 2'-deoxythymidine-3'-phosphorothioate
  modified_base 14: mod_base = OTHER; note = 2'-deoxyguanosine-3'-phosphorothioate
  modified_base 15: mod_base = OTHER; note = 2'-deoxyguanosine-3'-phosphorothioate
  modified_base 16: mod_base = OTHER; note = 2'-O-methyladenosine-3'- phosphorothioate
  modified_base 17: mod_base = OTHER; note = 2'-O-methyladenosine-3'- phosphorothioate
  modified_base 18: mod_base = OTHER; note = 2'-O-methylguanosine-3'- phosphorothioate
  modified_base 19: mod_base = OTHER; note = 2'-O-methyluridine-3'-phosphorothioate
  modified_base 20: mod_base = OTHER; note = 2'-O-methylguanosine-3'-phosphate
  misc_feature 1..5: note = RNA
  misc_feature 6..15: note = DNA
  misc_feature 16..20: note = RNA
ttcatcttcccttggaagtg

SEQ ID NO: 132 - DNA, 20 bp, synthetic construct
  source 1..20: mol_type = other DNA; note = Description of Artificial Sequence: Synthetic oligonucleotide; note = Description of Combined DNA/RNA Molecule: Synthetic oligonucleotide
  modified_base 1: mod_base = OTHER; note = 2'-O-methylguanosine-3'- phosphorothioate
  modified_base 2: mod_base = OTHER; note = 2'-O-methyladenosine-3'- phosphorothioate
  modified_base 3: mod_base = OTHER; note = 2'-O-methylguanosine-3'- phosphorothioate
  modified_base 4: mod_base = OTHER; note = 2'-O-methyladenosine-3'- phosphorothioate
  modified_base 5: mod_base = OTHER; note = 2'-O-methyladenosine-3'- phosphorothioate
  modified_base 6: mod_base = OTHER; note = 2'-deoxyguanosine-3'-phosphorothioate
  modified_base 7: mod_base = OTHER; note = 5'-methyl-deoxycytidine-3'-phosphorothioate
  modified_base 8: mod_base = OTHER; note = 5'-methyl-deoxycytidine-3'-phosphorothioate
  modified_base 9: mod_base = OTHER; note = 5'-methyl-deoxycytidine-3'-phosphorothioate
  modified_base 10: mod_base = OTHER; note = 2'-deoxythymidine-3'-phosphorothioate
  modified_base 11: mod_base = OTHER; note = 2'-deoxythymidine-3'-phosphorothioate
  modified_base 12: mod_base = OTHER; note = 5'-methyl-deoxycytidine-3'-phosphorothioate
  modified_base 13: mod_base = OTHER; note = 2'-deoxyadenosine-3'-phosphorothioate
  modified_base 14: mod_base = OTHER; note = 2'-deoxythymidine-3'-phosphorothioate
  modified_base 15: mod_base = OTHER; note = 5'-methyl-deoxycytidine-3'-phosphorothioate
  modified_base 16: mod_base = OTHER; note = 2'-O-methyluridine-3'-phosphorothioate
  modified_base 17: mod_base = OTHER; note = 2'-O-methyluridine-3'-phosphorothioate
  modified_base 18: mod_base = OTHER; note = 2'-O-methylcytidine-3'- phosphorothioate
  modified_base 19: mod_base = OTHER; note = 2'-O-methylcytidine-3'- phosphorothioate
  modified_base 20: mod_base = OTHER; note = 2'-O-methylcytidine-3'-phosphate
  misc_feature 1..5: note = RNA
  misc_feature 6..15: note = DNA
  misc_feature 16..20: note = RNA
gagaagcccttcatcttccc

SEQ ID NO: 133 - DNA, 20 bp, synthetic construct
  source 1..20: mol_type = other DNA; note = Description of Artificial Sequence: Synthetic oligonucleotide; note = Description of Combined DNA/RNA Molecule: Synthetic oligonucleotide
  modified_base 1: mod_base = OTHER; note = 2'-O-methylcytidine-3'- phosphorothioate
  modified_base 2: mod_base = OTHER; note = 2'-O-methyluridine-3'-phosphorothioate
  modified_base 3: mod_base = OTHER; note = 2'-O-methylcytidine-3'- phosphorothioate
  modified_base 4: mod_base = OTHER; note = 2'-O-methylguanosine-3'- phosphorothioate
  modified_base 5: mod_base = OTHER; note = 2'-O-methylguanosine-3'- phosphorothioate
  modified_base 6: mod_base = OTHER; note = 5'-methyl-deoxycytidine-3'-phosphorothioate
  modified_base 7: mod_base = OTHER; note = 5'-methyl-deoxycytidine-3'-phosphorothioate
  modified_base 8: mod_base = OTHER; note = 2'-deoxyadenosine-3'-phosphorothioate
  modified_base 9: mod_base = OTHER; note = 2'-deoxyguanosine-3'-phosphorothioate
  modified_base 10: mod_base = OTHER; note = 5'-methyl-deoxycytidine-3'-phosphorothioate
  modified_base 11: mod_base = OTHER; note = 2'-deoxyadenosine-3'-phosphorothioate
  modified_base 12: mod_base = OTHER; note = 2'-deoxyguanosine-3'-phosphorothioate
  modified_base 13: mod_base = OTHER; note = 2'-deoxyguanosine-3'-phosphorothioate
  modified_base 14: mod_base = OTHER; note = 2'-deoxyguanosine-3'-phosphorothioate
  modified_base 15: mod_base = OTHER; note = 2'-deoxyadenosine-3'-phosphorothioate
  modified_base 16: mod_base = OTHER; note = 2'-O-methylguanosine-3'- phosphorothioate
  modified_base 17: mod_base = OTHER; note = 2'-O-methyladenosine-3'- phosphorothioate
  modified_base 18: mod_base = OTHER; note = 2'-O-methyladenosine-3'- phosphorothioate
  modified_base 19: mod_base = OTHER; note = 2'-O-methylguanosine-3'- phosphorothioate
  modified_base 20: mod_base = OTHER; note = 2'-O-methylcytidine-3'-phosphate
  misc_feature 1..5: note = RNA
  misc_feature 6..15: note = DNA
  misc_feature 16..20: note = RNA
ctcggccagcagggagaagc

SEQ ID NO: 134 - DNA, 20 bp, synthetic construct
  source 1..20: mol_type = other DNA; note = Description of Artificial Sequence: Synthetic oligonucleotide; note = Description of Combined DNA/RNA Molecule: Synthetic oligonucleotide
  modified_base 1: mod_base = OTHER; note = 2'-O-methylcytidine-3'- phosphorothioate
  modified_base 2: mod_base = OTHER; note = 2'-O-methyluridine-3'-phosphorothioate
  modified_base 3: mod_base = OTHER; note = 2'-O-methylcytidine-3'- phosphorothioate
  modified_base 4: mod_base = OTHER; note = 2'-O-methylcytidine-3'- phosphorothioate
  modified_base 5: mod_base = OTHER; note = 2'-O-methyluridine-3'-phosphorothioate
  modified_base 6: mod_base = OTHER; note = 2'-deoxyguanosine-3'-phosphorothioate
  modified_base 7: mod_base = OTHER; note = 2'-deoxyguanosine-3'-phosphorothioate
  modified_base 8: mod_base = OTHER; note = 2'-deoxyguanosine-3'-phosphorothioate
  modified_base 9: mod_base = OTHER; note = 2'-deoxyguanosine-3'-phosphorothioate
  modified_base 10: mod_base = OTHER; note = 5'-methyl-deoxycytidine-3'-phosphorothioate
  modified_base 11: mod_base = OTHER; note = 2'-deoxythymidine-3'-phosphorothioate
  modified_base 12: mod_base = OTHER; note = 5'-methyl-deoxycytidine-3'-phosphorothioate
  modified_base 13: mod_base = OTHER; note = 2'-deoxyguanosine-3'-phosphorothioate
  modified_base 14: mod_base = OTHER; note = 2'-deoxyguanosine-3'-phosphorothioate
  modified_base 15: mod_base = OTHER; note = 5'-methyl-deoxycytidine-3'-phosphorothioate
  modified_base 16: mod_base = OTHER; note = 2'-O-methylcytidine-3'- phosphorothioate
  modified_base 17: mod_base = OTHER; note = 2'-O-methyladenosine-3'- phosphorothioate
  modified_base 18: mod_base = OTHER; note = 2'-O-methylguanosine-3'- phosphorothioate
  modified_base 19: mod_base = OTHER; note = 2'-O-methylcytidine-3'- phosphorothioate
  modified_base 20: mod_base = OTHER; note = 2'-O-methyladenosine-3'-phosphate
  misc_feature 1..5: note = RNA
  misc_feature 6..15: note = DNA
  misc_feature 16..20: note = RNA
ctcctggggctcggccagca

SEQ ID NO: 135 - DNA, 20 bp, synthetic construct
  source 1..20: mol_type = other DNA; note = Description of Artificial Sequence: Synthetic oligonucleotide; note = Description of Combined DNA/RNA Molecule: Synthetic oligonucleotide
  modified_base 1: mod_base = OTHER; note = 2'-O-methyluridine-3'-phosphorothioate
  modified_base 2: mod_base = OTHER; note = 2'-O-methylguanosine-3'- phosphorothioate
  modified_base 3: mod_base = OTHER; note = 2'-O-methyluridine-3'-phosphorothioate
  modified_base 4: mod_base = OTHER; note = 2'-O-methylcytidine-3'- phosphorothioate
  modified_base 5: mod_base = OTHER; note = 2'-O-methylcytidine-3'- phosphorothioate
  modified_base 6: mod_base = OTHER; note = 2'-deoxyadenosine-3'-phosphorothioate
  modified_base 7: mod_base = OTHER; note = 5'-methyl-deoxycytidine-3'-phosphorothioate
  modified_base 8: mod_base = OTHER; note = 5'-methyl-deoxycytidine-3'-phosphorothioate
  modified_base 9: mod_base = OTHER; note = 5'-methyl-deoxycytidine-3'-phosphorothioate
  modified_base 10: mod_base = OTHER; note = 2'-deoxyadenosine-3'-phosphorothioate
  modified_base 11: mod_base = OTHER; note = 2'-deoxyguanosine-3'-phosphorothioate
  modified_base 12: mod_base = OTHER; note = 2'-deoxyadenosine-3'-phosphorothioate
  modified_base 13: mod_base = OTHER; note = 2'-deoxyadenosine-3'-phosphorothioate
  modified_base 14: mod_base = OTHER; note = 5'-methyl-deoxycytidine-3'-phosphorothioate
  modified_base 15: mod_base = OTHER; note = 2'-deoxythymidine-3'-phosphorothioate
  modified_base 16: mod_base = OTHER; note = 2'-O-methylcytidine-3'- phosphorothioate
  modified_base 17: mod_base = OTHER; note = 2'-O-methylcytidine-3'- phosphorothioate
  modified_base 18: mod_base = OTHER; note = 2'-O-methyluridine-3'-phosphorothioate
  modified_base 19: mod_base = OTHER; note = 2'-O-methylguanosine-3'- phosphorothioate
  modified_base 20: mod_base = OTHER; note = 2'-O-methylguanosine-3'-phosphate
  misc_feature 1..5: note = RNA
  misc_feature 6..15: note = DNA
  misc_feature 16..20: note = RNA
tgtccacccagaactcctgg

SEQ ID NO: 136 - DNA, 20 bp, synthetic construct
  source 1..20: mol_type = other DNA; note = Description of Artificial Sequence: Synthetic oligonucleotide; note = Description of Combined DNA/RNA Molecule: Synthetic oligonucleotide
  modified_base 1: mod_base = OTHER; note = 2'-O-methylguanosine-3'- phosphorothioate
  modified_base 2: mod_base = OTHER; note = 2'-O-methyladenosine-3'- phosphorothioate
  modified_base 3: mod_base = OTHER; note = 2'-O-methylguanosine-3'- phosphorothioate
  modified_base 4: mod_base = OTHER; note = 2'-O-methylguanosine-3'- phosphorothioate
  modified_base 5: mod_base = OTHER; note = 2'-O-methyluridine-3'-phosphorothioate
  modified_base 6: mod_base = OTHER; note = 2'-deoxyguanosine-3'-phosphorothioate
  modified_base 7: mod_base = OTHER; note = 5'-methyl-deoxycytidine-3'-phosphorothioate
  modified_base 8: mod_base = OTHER; note = 2'-deoxythymidine-3'-phosphorothioate
  modified_base 9: mod_base = OTHER; note = 2'-deoxyguanosine-3'-phosphorothioate
  modified_base 10: mod_base = OTHER; note = 2'-deoxythymidine-3'-phosphorothioate
  modified_base 11: mod_base = OTHER; note = 2'-deoxythymidine-3'-phosphorothioate
  modified_base 12: mod_base = OTHER; note = 2'-deoxyguanosine-3'-phosphorothioate
  modified_base 13: mod_base = OTHER; note = 2'-deoxythymidine-3'-phosphorothioate
  modified_base 14: mod_base = OTHER; note = 5'-methyl-deoxycytidine-3'-phosphorothioate
  modified_base 15: mod_base = OTHER; note = 5'-methyl-deoxycytidine-3'-phosphorothioate
  modified_base 16: mod_base = OTHER; note = 2'-O-methyladenosine-3'- phosphorothioate
  modified_base 17: mod_base = OTHER; note = 2'-O-methylcytidine-3'- phosphorothioate
  modified_base 18: mod_base = OTHER; note = 2'-O-methylcytidine-3'- phosphorothioate
  modified_base 19: mod_base = OTHER; note = 2'-O-methylcytidine-3'- phosphorothioate
  modified_base 20: mod_base = OTHER; note = 2'-O-methyladenosine-3'-phosphate
  misc_feature 1..5: note = RNA
  misc_feature 6..15: note = DNA
  misc_feature 16..20: note = RNA
gaggtgctgttgtccaccca

SEQ ID NO: 137 - DNA, 20 bp, synthetic construct
  source 1..20: mol_type = other DNA; note = Description of Artificial Sequence: Synthetic oligonucleotide; note = Description of Combined DNA/RNA Molecule: Synthetic oligonucleotide
  modified_base 1: mod_base = OTHER; note = 2'-O-methyladenosine-3'- phosphorothioate
  modified_base 2: mod_base = OTHER; note = 2'-O-methyladenosine-3'- phosphorothioate
  modified_base 3: mod_base = OTHER; note = 2'-O-methylcytidine-3'- phosphorothioate
  modified_base 4: mod_base = OTHER; note = 2'-O-methyladenosine-3'- phosphorothioate
  modified_base 5: mod_base = OTHER; note = 2'-O-methylguanosine-3'- phosphorothioate
  modified_base 6: mod_base = OTHER; note = 2'-deoxyadenosine-3'-phosphorothioate
  modified_base 7: mod_base = OTHER; note = 5'-methyl-deoxycytidine-3'-phosphorothioate
  modified_base 8: mod_base = OTHER; note = 2'-deoxyadenosine-3'-phosphorothioate
  modified_base 9: mod_base = OTHER; note = 5'-methyl-deoxycytidine-3'-phosphorothioate
  modified_base 10: mod_base = OTHER; note = 2'-deoxythymidine-3'-phosphorothioate
  modified_base 11: mod_base = OTHER; note = 2'-deoxyguanosine-3'-phosphorothioate
  modified_base 12: mod_base = OTHER; note = 2'-deoxyadenosine-3'-phosphorothioate
  modified_base 13: mod_base = OTHER; note = 2'-deoxyguanosine-3'-phosphorothioate
  modified_base 14: mod_base = OTHER; note = 2'-deoxyguanosine-3'-phosphorothioate
  modified_base 15: mod_base = OTHER; note = 2'-deoxythymidine-3'-phosphorothioate
  modified_base 16: mod_base = OTHER; note = 2'-O-methylguanosine-3'- phosphorothioate
  modified_base 17: mod_base = OTHER; note = 2'-O-methylcytidine-3'- phosphorothioate
  modified_base 18: mod_base = OTHER; note = 2'-O-methyluridine-3'-phosphorothioate
  modified_base 19: mod_base = OTHER; note = 2'-O-methylguanosine-3'- phosphorothioate
  modified_base 20: mod_base = OTHER; note = 2'-O-methyluridine-3'-phosphate
  misc_feature 1..5: note = RNA
  misc_feature 6..15: note = DNA
  misc_feature 16..20: note = RNA
aacagacactgaggtgctgt

SEQ ID NO: 138 - DNA, 20 bp, synthetic construct
  source 1..20: mol_type = other DNA; note = Description of Artificial Sequence: Synthetic oligonucleotide; note = Description of Combined DNA/RNA Molecule: Synthetic oligonucleotide
  modified_base 1: mod_base = OTHER; note = 2'-O-methyladenosine-3'- phosphorothioate
  modified_base 2: mod_base = OTHER; note = 2'-O-methylguanosine-3'- phosphorothioate
  modified_base 3: mod_base = OTHER; note = 2'-O-methyladenosine-3'- phosphorothioate
  modified_base 4: mod_base = OTHER; note = 2'-O-methylguanosine-3'- phosphorothioate
  modified_base 5: mod_base = OTHER; note = 2'-O-methyladenosine-3'- phosphorothioate
  modified_base 6: mod_base = OTHER; note = 2'-deoxyguanosine-3'-phosphorothioate
  modified_base 7: mod_base = OTHER; note = 5'-methyl-deoxycytidine-3'-phosphorothioate
  modified_base 8: mod_base = OTHER; note = 2'-deoxyadenosine-3'-phosphorothioate
  modified_base 9: mod_base = OTHER; note = 2'-deoxythymidine-3'-phosphorothioate
  modified_base 10: mod_base = OTHER; note = 2'-deoxyguanosine-3'-phosphorothioate
  modified_base 11: mod_base = OTHER; note = 2'-deoxyguanosine-3'-phosphorothioate
  modified_base 12: mod_base = OTHER; note = 2'-deoxyguanosine-3'-phosphorothioate
  modified_base 13: mod_base = OTHER; note = 2'-deoxyadenosine-3'-phosphorothioate
  modified_base 14: mod_base = OTHER; note = 2'-deoxyadenosine-3'-phosphorothioate
  modified_base 15: mod_base = OTHER; note = 5'-methyl-deoxycytidine-3'-phosphorothioate
  modified_base 16: mod_base = OTHER; note = 2'-O-methyladenosine-3'- phosphorothioate
  modified_base 17: mod_base = OTHER; note = 2'-O-methylguanosine-3'- phosphorothioate
  modified_base 18: mod_base = OTHER; note = 2'-O-methyladenosine-3'- phosphorothioate
  modified_base 19: mod_base = OTHER; note = 2'-O-methylcytidine-3'- phosphorothioate
  modified_base 20: mod_base = OTHER; note = 2'-O-methyladenosine-3'-phosphate
  misc_feature 1..5: note = RNA
  misc_feature 6..15: note = DNA
  misc_feature 16..20: note = RNA
agagagcatgggaacagaca

SEQ ID NO: 139 - DNA, 20 bp, synthetic construct
  source 1..20: mol_type = other DNA; note = Description of Artificial Sequence: Synthetic oligonucleotide; note = Description of Combined DNA/RNA Molecule: Synthetic oligonucleotide
  modified_base 1: mod_base = OTHER; note = 2'-O-methyluridine-3'-phosphorothioate
  modified_base 2: mod_base = OTHER; note = 2'-O-methylguanosine-3'- phosphorothioate
  modified_base 3: mod_base = OTHER; note = 2'-O-methylcytidine-3'- phosphorothioate
  modified_base 4: mod_base = OTHER; note = 2'-O-methylcytidine-3'- phosphorothioate
  modified_base 5: mod_base = OTHER; note = 2'-O-methylcytidine-3'- phosphorothioate
  modified_base 6: mod_base = OTHER; note = 2'-deoxyadenosine-3'-phosphorothioate
  modified_base 7: mod_base = OTHER; note = 2'-deoxythymidine-3'-phosphorothioate
  modified_base 8: mod_base = OTHER; note = 2'-deoxyguanosine-3'-phosphorothioate
  modified_base 9: mod_base = OTHER; note = 5'-methyl-deoxycytidine-3'-phosphorothioate
  modified_base 10: mod_base = OTHER; note = 5'-methyl-deoxycytidine-3'-phosphorothioate
  modified_base 11: mod_base = OTHER; note = 2'-deoxyadenosine-3'-phosphorothioate
  modified_base 12: mod_base = OTHER; note = 2'-deoxyguanosine-3'-phosphorothioate
  modified_base 13: mod_base = OTHER; note = 2'-deoxyadenosine-3'-phosphorothioate
  modified_base 14: mod_base = OTHER; note = 2'-deoxyguanosine-3'-phosphorothioate
  modified_base 15: mod_base = OTHER; note = 2'-deoxyadenosine-3'-phosphorothioate
  modified_base 16: mod_base = OTHER; note = 2'-O-methylguanosine-3'- phosphorothioate
  modified_base 17: mod_base = OTHER; note = 2'-O-methylcytidine-3'- phosphorothioate
  modified_base 18: mod_base = OTHER; note = 2'-O-methyladenosine-3'- phosphorothioate
  modified_base 19: mod_base = OTHER; note = 2'-O-methyluridine-3'-phosphorothioate
  modified_base 20: mod_base = OTHER; note = 2'-O-methylguanosine-3'-phosphate
  misc_feature 1..5: note = RNA
  misc_feature 6..15: note = DNA
  misc_feature 16..20: note = RNA
tgcccatgccagagagcatg

SEQ ID NO: 140 - DNA, 20 bp, synthetic construct
  source 1..20: mol_type = other DNA; note = Description of Artificial Sequence: Synthetic oligonucleotide; note = Description of Combined DNA/RNA Molecule: Synthetic oligonucleotide
  modified_base 1: mod_base = OTHER; note = 2'-O-methylcytidine-3'- phosphorothioate
  modified_base 2: mod_base = OTHER; note = 2'-O-methyladenosine-3'- phosphorothioate
  modified_base 3: mod_base = OTHER; note = 2'-O-methylguanosine-3'- phosphorothioate
  modified_base 4: mod_base = OTHER; note = 2'-O-methyluridine-3'-phosphorothioate
  modified_base 5: mod_base = OTHER; note = 2'-O-methylguanosine-3'- phosphorothioate
  modified_base 6: mod_base = OTHER; note = 5'-methyl-deoxycytidine-3'-phosphorothioate
  modified_base 7: mod_base = OTHER; note = 2'-deoxythymidine-3'-phosphorothioate
  modified_base 8: mod_base = OTHER; note = 2'-deoxyguanosine-3'-phosphorothioate
  modified_base 9: mod_base = OTHER; note = 2'-deoxyguanosine-3'-phosphorothioate
  modified_base 10: mod_base = OTHER; note = 2'-deoxyadenosine-3'-phosphorothioate
  modified_base 11: mod_base = OTHER; note = 2'-deoxyadenosine-3'-phosphorothioate
  modified_base 12: mod_base = OTHER; note = 2'-deoxyguanosine-3'-phosphorothioate
  modified_base 13: mod_base = OTHER; note = 2'-deoxyguanosine-3'-phosphorothioate
  modified_base 14: mod_base = OTHER; note = 2'-deoxythymidine-3'-phosphorothioate
  modified_base 15: mod_base = OTHER; note = 2'-deoxyguanosine-3'-phosphorothioate
  modified_base 16: mod_base = OTHER; note = 2'-O-methylcytidine-3'- phosphorothioate
  modified_base 17: mod_base = OTHER; note = 2'-O-methylcytidine-3'- phosphorothioate
  modified_base 18: mod_base = OTHER; note = 2'-O-methylcytidine-3'- phosphorothioate
  modified_base 19: mod_base = OTHER; note = 2'-O-methyladenosine-3'- phosphorothioate
  modified_base 20: mod_base = OTHER; note = 2'-O-methyluridine-3'-phosphate
  misc_feature 1..5: note = RNA
  misc_feature 6..15: note = DNA
  misc_feature 16..20: note = RNA
cagtgctggaaggtgcccat

SEQ ID NO: 141 - DNA, 20 bp, synthetic construct
  source 1..20: mol_type = other DNA; note = Description of Artificial Sequence: Synthetic oligonucleotide; note = Description of Combined DNA/RNA Molecule: Synthetic oligonucleotide
  modified_base 1: mod_base = OTHER; note = 2'-O-methyladenosine-3'- phosphorothioate
  modified_base 2: mod_base = OTHER; note = 2'-O-methyluridine-3'-phosphorothioate
  modified_base 3: mod_base = OTHER; note = 2'-O-methylguanosine-3'- phosphorothioate
  modified_base 4: mod_base = OTHER; note = 2'-O-methyluridine-3'-phosphorothioate
  modified_base 5: mod_base = OTHER; note = 2'-O-methylcytidine-3'- phosphorothioate
  modified_base 6: mod_base = OTHER; note = 2'-deoxyadenosine-3'-phosphorothioate
  modified_base 7: mod_base = OTHER; note = 5'-methyl-deoxycytidine-3'-phosphorothioate
  modified_base 8: mod_base = OTHER; note = 2'-deoxythymidine-3'-phosphorothioate
  modified_base 9: mod_base = OTHER; note = 5'-methyl-deoxycytidine-3'-phosphorothioate
  modified_base 10: mod_base = OTHER; note = 5'-methyl-deoxycytidine-3'-phosphorothioate
  modified_base 11: mod_base = OTHER; note = 2'-deoxyadenosine-3'-phosphorothioate
  modified_base 12: mod_base = OTHER; note = 2'-deoxyguanosine-3'-phosphorothioate
  modified_base 13: mod_base = OTHER; note = 2'-deoxythymidine-3'-phosphorothioate
  modified_base 14: mod_base = OTHER; note = 2'-deoxyguanosine-3'-phosphorothioate
  modified_base 15: mod_base = OTHER; note = 5'-methyl-deoxycytidine-3'-phosphorothioate
  modified_base 16: mod_base = OTHER; note = 2'-O-methyluridine-3'-phosphorothioate
  modified_base 17: mod_base = OTHER; note = 2'-O-methylguanosine-3'- phosphorothioate
  modified_base 18: mod_base = OTHER; note = 2'-O-methylguanosine-3'- phosphorothioate
  modified_base 19: mod_base = OTHER; note = 2'-O-methyladenosine-3'- phosphorothioate
  modified_base 20: mod_base = OTHER; note = 2'-O-methyladenosine-3'-phosphate
  misc_feature 1..5: note = RNA
  misc_feature 6..15: note = DNA
  misc_feature 16..20: note = RNA
atgtcactccagtgctggaa

SEQ ID NO: 142 - DNA, 20 bp, synthetic construct
  source 1..20: mol_type = other DNA; note = Description of Artificial Sequence: Synthetic oligonucleotide; note = Description of Combined DNA/RNA Molecule: Synthetic oligonucleotide
  modified_base 1: mod_base = OTHER; note = 2'-O-methyladenosine-3'- phosphorothioate
  modified_base 2: mod_base = OTHER; note = 2'-O-methyladenosine-3'- phosphorothioate
  modified_base 3: mod_base = OTHER; note = 2'-O-methylguanosine-3'- phosphorothioate
  modified_base 4: mod_base = OTHER; note = 2'-O-methyluridine-3'-phosphorothioate
  modified_base 5: mod_base = OTHER; note = 2'-O-methyluridine-3'-phosphorothioate
  modified_base 6: mod_base = OTHER; note = 2'-deoxyguanosine-3'-phosphorothioate
  modified_base 7: mod_base = OTHER; note = 2'-deoxythymidine-3'-phosphorothioate
  modified_base 8: mod_base = OTHER; note = 5'-methyl-deoxycytidine-3'-phosphorothioate
  modified_base 9: mod_base = OTHER; note = 5'-methyl-deoxycytidine-3'-phosphorothioate
  modified_base 10: mod_base = OTHER; note = 2'-deoxythymidine-3'-phosphorothioate
  modified_base 11: mod_base = OTHER; note = 2'-deoxyguanosine-3'-phosphorothioate
  modified_base 12: mod_base = OTHER; note = 2'-deoxyguanosine-3'-phosphorothioate
  modified_base 13: mod_base = OTHER; note = 2'-deoxyadenosine-3'-phosphorothioate
  modified_base 14: mod_base = OTHER; note = 2'-deoxythymidine-3'-phosphorothioate
  modified_base 15: mod_base = OTHER; note = 2'-deoxyguanosine-3'-phosphorothioate
  modified_base 16: mod_base = OTHER; note = 2'-O-methyluridine-3'-phosphorothioate
  modified_base 17: mod_base = OTHER; note = 2'-O-methylcytidine-3'- phosphorothioate
  modified_base 18: mod_base = OTHER; note = 2'-O-methyladenosine-3'- phosphorothioate
  modified_base 19: mod_base = OTHER; note = 2'-O-methylcytidine-3'- phosphorothioate
  modified_base 20: mod_base = OTHER; note = 2'-O-methyluridine-3'-phosphate
  misc_feature 1..5: note = RNA
  misc_feature 6..15: note = DNA
  misc_feature 16..20: note = RNA
aagttgtcctggatgtcact

SEQ ID NO: 143 - DNA, 20 bp, synthetic construct
  source 1..20: mol_type = other DNA; note = Description of Artificial Sequence: Synthetic oligonucleotide; note = Description of Combined DNA/RNA Molecule: Synthetic oligonucleotide
  modified_base 1: mod_base = OTHER; note = 2'-O-methyladenosine-3'- phosphorothioate
  modified_base 2: mod_base = OTHER; note = 2'-O-methylguanosine-3'- phosphorothioate
  modified_base 3: mod_base = OTHER; note = 2'-O-methyluridine-3'-phosphorothioate
  modified_base 4: mod_base = OTHER; note = 2'-O-methylcytidine-3'- phosphorothioate
  modified_base 5: mod_base = OTHER; note = 2'-O-methyladenosine-3'- phosphorothioate
  modified_base 6: mod_base = OTHER; note = 5'-methyl-deoxycytidine-3'-phosphorothioate
  modified_base 7: mod_base = OTHER; note = 5'-methyl-deoxycytidine-3'-phosphorothioate
  modified_base 8: mod_base = OTHER; note = 2'-deoxyguanosine-3'-phosphorothioate
  modified_base 9: mod_base = OTHER; note = 2'-deoxyadenosine-3'-phosphorothioate
  modified_base 10: mod_base = OTHER; note = 2'-deoxyguanosine-3'-phosphorothioate
  modified_base 11: mod_base = OTHER; note = 2'-deoxyadenosine-3'-phosphorothioate
  modified_base 12: mod_base = OTHER; note = 2'-deoxyadenosine-3'-phosphorothioate
  modified_base 13: mod_base = OTHER; note = 2'-deoxyguanosine-3'-phosphorothioate
  modified_base 14: mod_base = OTHER; note = 2'-deoxythymidine-3'-phosphorothioate
  modified_base 15: mod_base = OTHER; note = 2'-deoxythymidine-3'-phosphorothioate
  modified_base 16: mod_base = OTHER; note = 2'-O-methylguanosine-3'- phosphorothioate
  modified_base 17: mod_base = OTHER; note = 2'-O-methyluridine-3'-phosphorothioate
  modified_base 18: mod_base = OTHER; note = 2'-O-methylcytidine-3'- phosphorothioate
  modified_base 19: mod_base = OTHER; note = 2'-O-methylcytidine-3'- phosphorothioate
  modified_base 20: mod_base = OTHER; note = 2'-O-methyluridine-3'-phosphate
  misc_feature 1..5: note = RNA
  misc_feature 6..15: note = DNA
  misc_feature 16..20: note = RNA
agtcaccgagaagttgtcct

SEQ ID NO: 144 - DNA, 20 bp, synthetic construct
  source 1..20: mol_type = other DNA; note = Description of Artificial Sequence: Synthetic oligonucleotide; note = Description of Combined DNA/RNA Molecule: Synthetic oligonucleotide
  modified_base 1: mod_base = OTHER; note = 2'-O-methyladenosine-3'- phosphorothioate
  modified_base 2: mod_base = OTHER; note = 2'-O-methyladenosine-3'- phosphorothioate
  modified_base 3: mod_base = OTHER; note = 2'-O-methylguanosine-3'- phosphorothioate
  modified_base 4: mod_base = OTHER; note = 2'-O-methylguanosine-3'- phosphorothioate
  modified_base 5: mod_base = OTHER; note = 2'-O-methylguanosine-3'- phosphorothioate
  modified_base 6: mod_base = OTHER; note = 5'-methyl-deoxycytidine-3'-phosphorothioate
  modified_base 7: mod_base = OTHER; note = 2'-deoxyadenosine-3'-phosphorothioate
  modified_base 8: mod_base = OTHER; note = 5'-methyl-deoxycytidine-3'-phosphorothioate
  modified_base 9: mod_base = OTHER; note = 2'-deoxythymidine-3'-phosphorothioate
  modified_base 10: mod_base = OTHER; note = 2'-deoxythymidine-3'-phosphorothioate
  modified_base 11: mod_base = OTHER; note = 2'-deoxyguanosine-3'-phosphorothioate
  modified_base 12: mod_base = OTHER; note = 2'-deoxyadenosine-3'-phosphorothioate
  modified_base 13: mod_base = OTHER; note = 2'-deoxyguanosine-3'-phosphorothioate
  modified_base 14: mod_base = OTHER; note = 2'-deoxythymidine-3'-phosphorothioate
  modified_base 15: mod_base = OTHER; note = 5'-methyl-deoxycytidine-3'-phosphorothioate
  modified_base 16: mod_base = OTHER; note = 2'-O-methyladenosine-3'- phosphorothioate
  modified_base 17: mod_base = OTHER; note = 2'-O-methylcytidine-3'- phosphorothioate
  modified_base 18: mod_base = OTHER; note = 2'-O-methylcytidine-3'- phosphorothioate
  modified_base 19: mod_base = OTHER; note = 2'-O-methylguanosine-3'- phosphorothioate
  modified_base 20: mod_base = OTHER; note = 2'-O-methyladenosine-3'-phosphate
  misc_feature 1..5: note = RNA
  misc_feature 6..15: note = DNA
  misc_feature 16..20: note = RNA
aagggcacttgagtcaccga

SEQ ID NO: 145 - DNA, 20 bp, synthetic construct
  source 1..20: mol_type = other DNA; note = Description of Artificial Sequence: Synthetic oligonucleotide; note = Description of Combined DNA/RNA Molecule: Synthetic oligonucleotide
  modified_base 1: mod_base = OTHER; note = 2'-O-methylguanosine-3'- phosphorothioate
  modified_base 2: mod_base = OTHER; note = 2'-O-methylguanosine-3'- phosphorothioate
  modified_base 3: mod_base = OTHER; note = 2'-O-methylcytidine-3'- phosphorothioate
  modified_base 4: mod_base = OTHER; note = 2'-O-methylguanosine-3'- phosphorothioate
  modified_base 5: mod_base = OTHER; note = 2'-O-methylcytidine-3'- phosphorothioate
  modified_base 6: mod_base = OTHER; note = 2'-deoxythymidine-3'-phosphorothioate
  modified_base 7: mod_base = OTHER; note = 5'-methyl-deoxycytidine-3'-phosphorothioate
  modified_base 8: mod_base = OTHER; note = 2'-deoxythymidine-3'-phosphorothioate
  modified_base 9: mod_base = OTHER; note = 5'-methyl-deoxycytidine-3'-phosphorothioate
  modified_base 10: mod_base = OTHER; note = 2'-deoxyadenosine-3'-phosphorothioate
  modified_base 11: mod_base = OTHER; note = 2'-deoxyguanosine-3'-phosphorothioate
  modified_base 12: mod_base = OTHER; note = 2'-deoxythymidine-3'-phosphorothioate
  modified_base 13: mod_base = OTHER; note = 2'-deoxyguanosine-3'-phosphorothioate
  modified_base 14: mod_base = OTHER; note = 2'-deoxyadenosine-3'-phosphorothioate
  modified_base 15: mod_base = OTHER; note = 2'-deoxyadenosine-3'-phosphorothioate
  modified_base 16: mod_base = OTHER; note = 2'-O-methylguanosine-3'- phosphorothioate
  modified_base 17: mod_base = OTHER; note = 2'-O-methylguanosine-3'- phosphorothioate
  modified_base 18: mod_base = OTHER; note = 2'-O-methylguanosine-3'- phosphorothioate
  modified_base 19: mod_base = OTHER; note = 2'-O-methylcytidine-3'- phosphorothioate
  modified_base 20: mod_base = OTHER; note = 2'-O-methyladenosine-3'-phosphate
  misc_feature 1..5: note = RNA
  misc_feature 6..15: note = DNA
  misc_feature 16..20: note = RNA
ggcgctctcagtgaagggca

SEQ ID NO: 146 - DNA, 20 bp, synthetic construct
  source 1..20: mol_type = other DNA; note = Description of Artificial Sequence: Synthetic oligonucleotide; note = Description of Combined DNA/RNA Molecule: Synthetic oligonucleotide
  modified_base 1: mod_base = OTHER; note = 2'-O-methylguanosine-3'- phosphorothioate
  modified_base 2: mod_base = OTHER; note = 2'-O-methylcytidine-3'- phosphorothioate
  modified_base 3: mod_base = OTHER; note = 2'-O-methyladenosine-3'- phosphorothioate
  modified_base 4: mod_base = OTHER; note = 2'-O-methylguanosine-3'- phosphorothioate
  modified_base 5: mod_base = OTHER; note = 2'-O-methylcytidine-3'- phosphorothioate
  modified_base 6: mod_base = OTHER; note = 2'-deoxyadenosine-3'-phosphorothioate
  modified_base 7: mod_base = OTHER; note = 2'-deoxyguanosine-3'-phosphorothioate
  modified_base 8: mod_base = OTHER; note = 2'-deoxyguanosine-3'-phosphorothioate
  modified_base 9: mod_base = OTHER; note = 5'-methyl-deoxycytidine-3'-phosphorothioate
  modified_base 10: mod_base = OTHER; note = 2'-deoxyadenosine-3'-phosphorothioate
  modified_base 11: mod_base = OTHER; note = 2'-deoxyguanosine-3'-phosphorothioate
  modified_base 12: mod_base = OTHER; note = 2'-deoxyguanosine-3'-phosphorothioate
  modified_base 13: mod_base = OTHER; note = 5'-methyl-deoxycytidine-3'-phosphorothioate
  modified_base 14: mod_base = OTHER; note = 2'-deoxyguanosine-3'-phosphorothioate
  modified_base 15: mod_base = OTHER; note = 5'-methyl-deoxycytidine-3'-phosphorothioate
  modified_base 16: mod_base = OTHER; note = 2'-O-methyluridine-3'-phosphorothioate
  modified_base 17: mod_base = OTHER; note = 2'-O-methylcytidine-3'- phosphorothioate
  modified_base 18: mod_base = OTHER; note = 2'-O-methyluridine-3'-phosphorothioate
  modified_base 19: mod_base = OTHER; note = 2'-O-methylcytidine-3'- phosphorothioate
  modified_base 20: mod_base = OTHER; note = 2'-O-methyladenosine-3'-phosphate
  misc_feature 1..5: note = RNA
  misc_feature 6..15: note = DNA
  misc_feature 16..20: note = RNA
gcagcaggcaggcgctctca

SEQ ID NO: 147 - DNA, 20 bp, synthetic construct
  source 1..20: mol_type = other DNA; note = Description of Artificial Sequence: Synthetic oligonucleotide; note = Description of Combined DNA/RNA Molecule: Synthetic oligonucleotide
  modified_base 1: mod_base = OTHER; note = 2'-O-methylguanosine-3'- phosphorothioate
  modified_base 2: mod_base = OTHER; note = 2'-O-methyladenosine-3'- phosphorothioate
  modified_base 3: mod_base = OTHER; note = 2'-O-methylguanosine-3'- phosphorothioate
  modified_base 4: mod_base = OTHER; note = 2'-O-methylguanosine-3'- phosphorothioate
  modified_base 5: mod_base = OTHER; note = 2'-O-methylcytidine-3'- phosphorothioate
  modified_base 6: mod_base = OTHER; note = 2'-deoxythymidine-3'-phosphorothioate
  modified_base 7: mod_base = OTHER; note = 2'-deoxyguanosine-3'-phosphorothioate
  modified_base 8: mod_base = OTHER; note = 2'-deoxyguanosine-3'-phosphorothioate
  modified_base 9: mod_base = OTHER; note = 2'-deoxyadenosine-3'-phosphorothioate
  modified_base 10: mod_base = OTHER; note = 2'-deoxythymidine-3'-phosphorothioate
  modified_base 11: mod_base = OTHER; note = 5'-methyl-deoxycytidine-3'-phosphorothioate
  modified_base 12: mod_base = OTHER; note = 2'-deoxyadenosine-3'-phosphorothioate
  modified_base 13: mod_base = OTHER; note = 2'-deoxyguanosine-3'-phosphorothioate
  modified_base 14: mod_base = OTHER; note = 5'-methyl-deoxycytidine-3'-phosphorothioate
  modified_base 15: mod_base = OTHER; note = 2'-deoxyadenosine-3'-phosphorothioate
  modified_base 16: mod_base = OTHER; note = 2'-O-methylguanosine-3'- phosphorothioate
  modified_base 17: mod_base = OTHER; note = 2'-O-methylcytidine-3'- phosphorothioate
  modified_base 18: mod_base = OTHER; note = 2'-O-methyladenosine-3'- phosphorothioate
  modified_base 19: mod_base = OTHER; note = 2'-O-methylguanosine-3'- phosphorothioate
  modified_base 20: mod_base = OTHER; note = 2'-O-methylguanosine-3'-phosphate
  misc_feature 1..5: note = RNA
  misc_feature 6..15: note = DNA
  misc_feature 16..20: note = RNA
gaggctggatcagcagcagg

SEQ ID NO: 148 - DNA, 20 bp, synthetic construct
  source 1..20: mol_type = other DNA; note = Description of Artificial Sequence: Synthetic oligonucleotide; note = Description of Combined DNA/RNA Molecule: Synthetic oligonucleotide
  modified_base 1: mod_base = OTHER; note = 2'-O-methylguanosine-3'- phosphorothioate
  modified_base 2: mod_base = OTHER; note = 2'-O-methyladenosine-3'- phosphorothioate
  modified_base 3: mod_base = OTHER; note = 2'-O-methylguanosine-3'- phosphorothioate
  modified_base 4: mod_base = OTHER; note = 2'-O-methylguanosine-3'- phosphorothioate
  modified_base 5: mod_base = OTHER; note = 2'-O-methylcytidine-3'- phosphorothioate
  modified_base 6: mod_base = OTHER; note = 2'-deoxyadenosine-3'-phosphorothioate
  modified_base 7: mod_base = OTHER; note = 2'-deoxythymidine-3'-phosphorothioate
  modified_base 8: mod_base = OTHER; note = 2'-deoxyadenosine-3'-phosphorothioate
  modified_base 9: mod_base = OTHER; note = 2'-deoxyguanosine-3'-phosphorothioate
  modified_base 10: mod_base = OTHER; note = 2'-deoxythymidine-3'-phosphorothioate
  modified_base 11: mod_base = OTHER; note = 2'-deoxyguanosine-3'-phosphorothioate
  modified_base 12: mod_base = OTHER; note = 2'-deoxyadenosine-3'-phosphorothioate
  modified_base 13: mod_base = OTHER; note = 2'-deoxyguanosine-3'-phosphorothioate
  modified_base 14: mod_base = OTHER; note = 2'-deoxyguanosine-3'-phosphorothioate
  modified_base 15: mod_base = OTHER; note = 5'-methyl-deoxycytidine-3'-phosphorothioate
  modified_base 16: mod_base = OTHER; note = 2'-O-methyluridine-3'-phosphorothioate
  modified_base 17: mod_base = OTHER; note = 2'-O-methylguanosine-3'- phosphorothioate
  modified_base 18: mod_base = OTHER; note = 2'-O-methylguanosine-3'- phosphorothioate
  modified_base 19: mod_base = OTHER; note = 2'-O-methyladenosine-3'- phosphorothioate
  modified_base 20: mod_base = OTHER; note = 2'-O-methyluridine-3'-phosphate
  misc_feature 1..5: note = RNA
  misc_feature 6..15: note = DNA
  misc_feature 16..20: note = RNA
gaggcatagtgaggctggat

SEQ ID NO: 149 - DNA, 20 bp, synthetic construct
  source 1..20: mol_type = other DNA; note = Description of Artificial Sequence: Synthetic oligonucleotide; note = Description of Combined DNA/RNA Molecule: Synthetic oligonucleotide
  modified_base 1: mod_base = OTHER; note = 2'-O-methyluridine-3'-phosphorothioate
  modified_base 2: mod_base = OTHER; note = 2'-O-methyluridine-3'-phosphorothioate
  modified_base 3: mod_base = OTHER; note = 2'-O-methylguanosine-3'- phosphorothioate
  modified_base 4: mod_base = OTHER; note = 2'-O-methyluridine-3'-phosphorothioate
  modified_base 5: mod_base = OTHER; note = 2'-O-methylcytidine-3'- phosphorothioate
  modified_base 6: mod_base = OTHER; note = 5'-methyl-deoxycytidine-3'-phosphorothioate
  modified_base 7: mod_base = OTHER; note = 2'-deoxyadenosine-3'-phosphorothioate
  modified_base 8: mod_base = OTHER; note = 2'-deoxyguanosine-3'-phosphorothioate
  modified_base 9: mod_base = OTHER; note = 2'-deoxyguanosine-3'-phosphorothioate
  modified_base 10: mod_base = OTHER; note = 2'-deoxythymidine-3'-phosphorothioate
  modified_base 11: mod_base = OTHER; note = 5'-methyl-deoxycytidine-3'-phosphorothioate
  modified_base 12: mod_base = OTHER; note = 2'-deoxyadenosine-3'-phosphorothioate
  modified_base 13: mod_base = OTHER; note = 2'-deoxyguanosine-3'-phosphorothioate
  modified_base 14: mod_base = OTHER; note = 2'-deoxyadenosine-3'-phosphorothioate
  modified_base 15: mod_base = OTHER; note = 2'-deoxyguanosine-3'-phosphorothioate
  modified_base 16: mod_base = OTHER; note = 2'-O-methylguanosine-3'- phosphorothioate
  modified_base 17: mod_base = OTHER; note = 2'-O-methylcytidine-3'- phosphorothioate
  modified_base 18: mod_base = OTHER; note = 2'-O-methyladenosine-3'- phosphorothioate
  modified_base 19: mod_base = OTHER; note = 2'-O-methyluridine-3'-phosphorothioate
  modified_base 20: mod_base = OTHER; note = 2'-O-methyladenosine-3'-phosphate
  misc_feature 1..5: note = RNA
  misc_feature 6..15: note = DNA
  misc_feature 16..20: note = RNA
ttgtccaggtcagaggcata

SEQ ID NO: 150 - DNA, 20 bp, synthetic construct
  source 1..20: mol_type = other DNA; note = Description of Artificial Sequence: Synthetic oligonucleotide; note = Description of Combined DNA/RNA Molecule: Synthetic oligonucleotide
  modified_base 1: mod_base = OTHER; note = 2'-O-methyladenosine-3'- phosphorothioate
  modified_base 2: mod_base = OTHER; note = 2'-O-methylcytidine-3'- phosphorothioate
  modified_base 3: mod_base = OTHER; note = 2'-O-methylcytidine-3'- phosphorothioate
  modified_base 4: mod_base = OTHER; note = 2'-O-methylcytidine-3'- phosphorothioate
  modified_base 5: mod_base = OTHER; note = 2'-O-methyluridine-3'-phosphorothioate
  modified_base 6: mod_base = OTHER; note = 5'-methyl-deoxycytidine-3'-phosphorothioate
  modified_base 7: mod_base = OTHER; note = 5'-methyl-deoxycytidine-3'-phosphorothioate
  modified_base 8: mod_base = OTHER; note = 2'-deoxyadenosine-3'-phosphorothioate
  modified_base 9: mod_base = OTHER; note = 5'-methyl-deoxycytidine-3'-phosphorothioate
  modified_base 10: mod_base = OTHER; note = 5'-methyl-deoxycytidine-3'-phosphorothioate
  modified_base 11: mod_base = OTHER; note = 2'-deoxythymidine-3'-phosphorothioate
  modified_base 12: mod_base = OTHER; note = 2'-deoxythymidine-3'-phosphorothioate
  modified_base 13: mod_base = OTHER; note = 2'-deoxyguanosine-3'-phosphorothioate
  modified_base 14: mod_base = OTHER; note = 2'-deoxythymidine-3'-phosphorothioate
  modified_base 15: mod_base = OTHER; note = 5'-methyl-deoxycytidine-3'-phosphorothioate
  modified_base 16: mod_base = OTHER; note = 2'-O-methylcytidine-3'- phosphorothioate
  modified_base 17: mod_base = OTHER; note = 2'-O-methyladenosine-3'- phosphorothioate
  modified_base 18: mod_base = OTHER; note = 2'-O-methylguanosine-3'- phosphorothioate
  modified_base 19: mod_base = OTHER; note = 2'-O-methylguanosine-3'- phosphorothioate
  modified_base 20: mod_base = OTHER; note = 2'-O-methyluridine-3'-phosphate
  misc_feature 1..5: note = RNA
  misc_feature 6..15: note = DNA
  misc_feature 16..20: note = RNA
accctccaccttgtccaggt

SEQ ID NO: 151 - DNA, 20 bp, synthetic construct
  source 1..20: mol_type = other DNA; note = Description of Artificial Sequence: Synthetic oligonucleotide; note = Description of Combined DNA/RNA Molecule: Synthetic oligonucleotide
  modified_base 1: mod_base = OTHER; note = 2'-O-methylcytidine-3'- phosphorothioate
  modified_base 2: mod_base = OTHER; note = 2'-O-methyluridine-3'-phosphorothioate
  modified_base 3: mod_base = OTHER; note = 2'-O-methylguanosine-3'- phosphorothioate
  modified_base 4: mod_base = OTHER; note = 2'-O-methylguanosine-3'- phosphorothioate
  modified_base 5: mod_base = OTHER; note = 2'-O-methyladenosine-3'- phosphorothioate
  modified_base 6: mod_base = OTHER; note = 2'-deoxyadenosine-3'-phosphorothioate
  modified_base 7: mod_base = OTHER; note = 2'-deoxyadenosine-3'-phosphorothioate
  modified_base 8: mod_base = OTHER; note = 2'-deoxyguanosine-3'-phosphorothioate
  modified_base 9: mod_base = OTHER; note = 2'-deoxythymidine-3'-phosphorothioate
  modified_base 10: mod_base = OTHER; note = 2'-deoxyguanosine-3'-phosphorothioate
  modified_base 11: mod_base = OTHER; note = 2'-deoxyadenosine-3'-phosphorothioate
  modified_base 12: mod_base = OTHER; note = 2'-deoxyguanosine-3'-phosphorothioate
  modified_base 13: mod_base = OTHER; note = 2'-deoxyadenosine-3'-phosphorothioate
  modified_base 14: mod_base = OTHER; note = 5'-methyl-deoxycytidine-3'-phosphorothioate
  modified_base 15: mod_base = OTHER; note = 5'-methyl-deoxycytidine-3'-phosphorothioate
  modified_base 16: mod_base = OTHER; note = 2'-O-methylcytidine-3'- phosphorothioate
  modified_base 17: mod_base = OTHER; note = 2'-O-methyluridine-3'-phosphorothioate
  modified_base 18: mod_base = OTHER; note = 2'-O-methylcytidine-3'- phosphorothioate
  modified_base 19: mod_base = OTHER; note = 2'-O-methylcytidine-3'- phosphorothioate
  modified_base 20: mod_base = OTHER; note = 2'-O-methyladenosine-3'-phosphate
  misc_feature 1..5: note = RNA
  misc_feature 6..15: note = DNA
  misc_feature 16..20: note = RNA
ctggaaagtgagaccctcca

SEQ ID NO: 152 - DNA, 20 bp, synthetic construct
  source 1..20: mol_type = other DNA; note = Description of Artificial Sequence: Synthetic oligonucleotide; note = Description of Combined DNA/RNA Molecule: Synthetic oligonucleotide
  modified_base 1: mod_base = OTHER; note = 2'-O-methylguanosine-3'- phosphorothioate
  modified_base 2: mod_base = OTHER; note = 2'-O-methylguanosine-3'- phosphorothioate
  modified_base 3: mod_base = OTHER; note = 2'-O-methylguanosine-3'- phosphorothioate
  modified_base 4: mod_base = OTHER; note = 2'-O-methyladenosine-3'- phosphorothioate
  modified_base 5: mod_base = OTHER; note = 2'-O-methylguanosine-3'- phosphorothioate
  modified_base 6: mod_base = OTHER; note = 2'-deoxythymidine-3'-phosphorothioate
  modified_base 7: mod_base = OTHER; note = 2'-deoxythymidine-3'-phosphorothioate
  modified_base 8: mod_base = OTHER; note = 2'-deoxythymidine-3'-phosphorothioate
  modified_base 9: mod_base = OTHER; note = 2'-deoxythymidine-3'-phosphorothioate
  modified_base 10: mod_base = OTHER; note = 2'-deoxyguanosine-3'-phosphorothioate
  modified_base 11: mod_base = OTHER; note = 5'-methyl-deoxycytidine-3'-phosphorothioate
  modified_base 12: mod_base = OTHER; note = 2'-deoxythymidine-3'-phosphorothioate
  modified_base 13: mod_base = OTHER; note = 2'-deoxyguanosine-3'-phosphorothioate
  modified_base 14: mod_base = OTHER; note = 2'-deoxyguanosine-3'-phosphorothioate
  modified_base 15: mod_base = OTHER; note = 2'-deoxyadenosine-3'-phosphorothioate
  modified_base 16: mod_base = OTHER; note = 2'-O-methyladenosine-3'- phosphorothioate
  modified_base 17: mod_base = OTHER; note = 2'-O-methyladenosine-3'- phosphorothioate
  modified_base 18: mod_base = OTHER; note = 2'-O-methylguanosine-3'- phosphorothioate
  modified_base 19: mod_base = OTHER; note = 2'-O-methyluridine-3'-phosphorothioate
  modified_base 20: mod_base = OTHER; note = 2'-O-methylguanosine-3'-phosphate
  misc_feature 1..5: note = RNA
  misc_feature 6..15: note = DNA
  misc_feature 16..20: note = RNA
gggagttttgctggaaagtg

SEQ ID NO: 153 - DNA, 20 bp, synthetic construct
  source 1..20: mol_type = other DNA; note = Description of Artificial Sequence: Synthetic oligonucleotide; note = Description of Combined DNA/RNA Molecule: Synthetic oligonucleotide
  modified_base 1: mod_base = OTHER; note = 2'-O-methylcytidine-3'- phosphorothioate
  modified_base 2: mod_base = OTHER; note = 2'-O-methyladenosine-3'- phosphorothioate
  modified_base 3: mod_base = OTHER; note = 2'-O-methyluridine-3'-phosphorothioate
  modified_base 4: mod_base = OTHER; note = 2'-O-methylcytidine-3'- phosphorothioate
  modified_base 5: mod_base = OTHER; note = 2'-O-methylcytidine-3'- phosphorothioate
  modified_base 6: mod_base = OTHER; note = 2'-deoxyadenosine-3'-phosphorothioate
  modified_base 7: mod_base = OTHER; note = 2'-deoxyguanosine-3'-phosphorothioate
  modified_base 8: mod_base = OTHER; note = 2'-deoxythymidine-3'-phosphorothioate
  modified_base 9: mod_base = OTHER; note = 2'-deoxythymidine-3'-phosphorothioate
  modified_base 10: mod_base = OTHER; note = 2'-deoxyguanosine-3'-phosphorothioate
  modified_base 11: mod_base = OTHER; note = 2'-deoxyadenosine-3'-phosphorothioate
  modified_base 12: mod_base = OTHER; note = 2'-deoxyguanosine-3'-phosphorothioate
  modified_base 13: mod_base = OTHER; note = 2'-deoxyguanosine-3'-phosphorothioate
  modified_base 14: mod_base = OTHER; note = 2'-deoxyguanosine-3'-phosphorothioate
  modified_base 15: mod_base = OTHER; note = 2'-deoxyadenosine-3'-phosphorothioate
  modified_base 16: mod_base = OTHER; note = 2'-O-methylguanosine-3'- phosphorothioate
  modified_base 17: mod_base = OTHER; note = 2'-O-methyluridine-3'-phosphorothioate
  modified_base 18: mod_base = OTHER; note = 2'-O-methyluridine-3'-phosphorothioate
  modified_base 19: mod_base = OTHER; note = 2'-O-methyluridine-3'-phosphorothioate
  modified_base 20: mod_base = OTHER; note = 2'-O-methyluridine-3'-phosphate
  misc_feature 1..5: note = RNA
  misc_feature 6..15: note = DNA
  misc_feature 16..20: note = RNA
catccagttgagggagtttt

SEQ ID NO: 154 - DNA, 20 bp, synthetic construct
  source 1..20: mol_type = other DNA; note = Description of Artificial Sequence: Synthetic oligonucleotide; note = Description of Combined DNA/RNA Molecule: Synthetic oligonucleotide
  modified_base 1: mod_base = OTHER; note = 2'-O-methylguanosine-3'- phosphorothioate
  modified_base 2: mod_base = OTHER; note = 2'-O-methyladenosine-3'- phosphorothioate
  modified_base 3: mod_base = OTHER; note = 2'-O-methyluridine-3'-phosphorothioate
  modified_base 4: mod_base = OTHER; note = 2'-O-methyladenosine-3'- phosphorothioate
  modified_base 5: mod_base = OTHER; note = 2'-O-methylguanosine-3'- phosphorothioate
  modified_base 6: mod_base = OTHER; note = 2'-deoxythymidine-3'-phosphorothioate
  modified_base 7: mod_base = OTHER; note = 2'-deoxythymidine-3'-phosphorothioate
  modified_base 8: mod_base = OTHER; note = 2'-deoxythymidine-3'-phosphorothioate
  modified_base 9: mod_base = OTHER; note = 5'-methyl-deoxycytidine-3'-phosphorothioate
  modified_base 10: mod_base = OTHER; note = 2'-deoxythymidine-3'-phosphorothioate
  modified_base 11: mod_base = OTHER; note = 2'-deoxythymidine-3'-phosphorothioate
  modified_base 12: mod_base = OTHER; note = 5'-methyl-deoxycytidine-3'-phosphorothioate
  modified_base 13: mod_base = OTHER; note = 2'-deoxyadenosine-3'-phosphorothioate
  modified_base 14: mod_base = OTHER; note = 2'-deoxythymidine-3'-phosphorothioate
  modified_base 15: mod_base = OTHER; note = 5'-methyl-deoxycytidine-3'-phosphorothioate
  modified_base 16: mod_base = OTHER; note = 2'-O-methylcytidine-3'- phosphorothioate
  modified_base 17: mod_base = OTHER; note = 2'-O-methyladenosine-3'- phosphorothioate
  modified_base 18: mod_base = OTHER; note = 2'-O-methylguanosine-3'- phosphorothioate
  modified_base 19: mod_base = OTHER; note = 2'-O-methyluridine-3'-phosphorothioate
  modified_base 20: mod_base = OTHER; note = 2'-O-methyluridine-3'-phosphate
  misc_feature 1..5: note = RNA
  misc_feature 6..15: note = DNA
  misc_feature 16..20: note = RNA
gatagtttcttcatccagtt

SEQ ID NO: 155 - DNA, 20 bp, synthetic construct
  source 1..20: mol_type = other DNA; note = Description of Artificial Sequence: Synthetic oligonucleotide; note = Description of Combined DNA/RNA Molecule: Synthetic oligonucleotide
  modified_base 1: mod_base = OTHER; note = 2'-O-methyladenosine-3'- phosphorothioate
  modified_base 2: mod_base = OTHER; note = 2'-O-methyluridine-3'-phosphorothioate
  modified_base 3: mod_base = OTHER; note = 2'-O-methylguanosine-3'- phosphorothioate
  modified_base 4: mod_base = OTHER; note = 2'-O-methylguanosine-3'- phosphorothioate
  modified_base 5: mod_base = OTHER; note = 2'-O-methyluridine-3'-phosphorothioate
  modified_base 6: mod_base = OTHER; note = 5'-methyl-deoxycytidine-3'-phosphorothioate
  modified_base 7: mod_base = OTHER; note = 5'-methyl-deoxycytidine-3'-phosphorothioate
  modified_base 8: mod_base = OTHER; note = 2'-deoxyguanosine-3'-phosphorothioate
  modified_base 9: mod_base = OTHER; note = 2'-deoxyguanosine-3'-phosphorothioate
  modified_base 10: mod_base = OTHER; note = 2'-deoxyguanosine-3'-phosphorothioate
  modified_base 11: mod_base = OTHER; note = 2'-deoxyguanosine-3'-phosphorothioate
  modified_base 12: mod_base = OTHER; note = 2'-deoxyadenosine-3'-phosphorothioate
  modified_base 13: mod_base = OTHER; note = 2'-deoxyguanosine-3'-phosphorothioate
  modified_base 14: mod_base = OTHER; note = 2'-deoxyadenosine-3'-phosphorothioate
  modified_base 15: mod_base = OTHER; note = 2'-deoxythymidine-3'-phosphorothioate
  modified_base 16: mod_base = OTHER; note = 2'-O-methyladenosine-3'- phosphorothioate
  modified_base 17: mod_base = OTHER; note = 2'-O-methylguanosine-3'- phosphorothioate
  modified_base 18: mod_base = OTHER; note = 2'-O-methyluridine-3'-phosphorothioate
  modified_base 19: mod_base = OTHER; note = 2'-O-methyluridine-3'-phosphorothioate
  modified_base 20: mod_base = OTHER; note = 2'-O-methyluridine-3'-phosphate
  misc_feature 1..5: note = RNA
  misc_feature 6..15: note = DNA
  misc_feature 16..20: note = RNA
atggtccggggagatagttt

SEQ ID NO: 156 - DNA, 20 bp, synthetic construct
  source 1..20: mol_type = other DNA; note = Description of Artificial Sequence: Synthetic oligonucleotide; note = Description of Combined DNA/RNA Molecule: Synthetic oligonucleotide
  modified_base 1: mod_base = OTHER; note = 2'-O-methyluridine-3'-phosphorothioate
  modified_base 2: mod_base = OTHER; note = 2'-O-methylguanosine-3'- phosphorothioate
  modified_base 3: mod_base = OTHER; note = 2'-O-methylguanosine-3'- phosphorothioate
  modified_base 4: mod_base = OTHER; note = 2'-O-methyluridine-3'-phosphorothioate
  modified_base 5: mod_base = OTHER; note = 2'-O-methylcytidine-3'- phosphorothioate
  modified_base 6: mod_base = OTHER; note = 2'-deoxyadenosine-3'-phosphorothioate
  modified_base 7: mod_base = OTHER; note = 2'-deoxyguanosine-3'-phosphorothioate
  modified_base 8: mod_base = OTHER; note = 2'-deoxyguanosine-3'-phosphorothioate
  modified_base 9: mod_base = OTHER; note = 2'-deoxythymidine-3'-phosphorothioate
  modified_base 10: mod_base = OTHER; note = 2'-deoxyguanosine-3'-phosphorothioate
  modified_base 11: mod_base = OTHER; note = 2'-deoxyguanosine-3'-phosphorothioate
  modified_base 12: mod_base = OTHER; note = 2'-deoxyadenosine-3'-phosphorothioate
  modified_base 13: mod_base = OTHER; note = 2'-deoxythymidine-3'-phosphorothioate
  modified_base 14: mod_base = OTHER; note = 2'-deoxyguanosine-3'-phosphorothioate
  modified_base 15: mod_base = OTHER; note = 2'-deoxyguanosine-3'-phosphorothioate
  modified_base 16: mod_base = OTHER; note = 2'-O-methyluridine-3'-phosphorothioate
  modified_base 17: mod_base = OTHER; note = 2'-O-methylcytidine-3'- phosphorothioate
  modified_base 18: mod_base = OTHER; note = 2'-O-methylcytidine-3'- phosphorothioate
  modified_base 19: mod_base = OTHER; note = 2'-O-methylguanosine-3'- phosphorothioate
  modified_base 20: mod_base = OTHER; note = 2'-O-methylguanosine-3'-phosphate
  misc_feature 1..5: note = RNA
  misc_feature 6..15: note = DNA
  misc_feature 16..20: note = RNA
tggtcaggtggatggtccgg

SEQ ID NO: 157 - DNA, 20 bp, synthetic construct
  source 1..20: mol_type = other DNA; note = Description of Artificial Sequence: Synthetic oligonucleotide; note = Description of Combined DNA/RNA Molecule: Synthetic oligonucleotide
  modified_base 1: mod_base = OTHER; note = 2'-O-methylcytidine-3'- phosphorothioate
  modified_base 2: mod_base = OTHER; note = 2'-O-methyladenosine-3'- phosphorothioate
  modified_base 3: mod_base = OTHER; note = 2'-O-methylguanosine-3'- phosphorothioate
  modified_base 4: mod_base = OTHER; note = 2'-O-methyluridine-3'-phosphorothioate
  modified_base 5: mod_base = OTHER; note = 2'-O-methyluridine-3'-phosphorothioate
  modified_base 6: mod_base = OTHER; note = 2'-deoxyguanosine-3'-phosphorothioate
  modified_base 7: mod_base = OTHER; note = 2'-deoxyguanosine-3'-phosphorothioate
  modified_base 8: mod_base = OTHER; note = 2'-deoxyguanosine-3'-phosphorothioate
  modified_base 9: mod_base = OTHER; note = 2'-deoxyguanosine-3'-phosphorothioate
  modified_base 10: mod_base = OTHER; note = 5'-methyl-deoxycytidine-3'-phosphorothioate
  modified_base 11: mod_base = OTHER; note = 2'-deoxyadenosine-3'-phosphorothioate
  modified_base 12: mod_base = OTHER; note = 2'-deoxythymidine-3'-phosphorothioate
  modified_base 13: mod_base = OTHER; note = 2'-deoxyguanosine-3'-phosphorothioate
  modified_base 14: mod_base = OTHER; note = 2'-deoxyguanosine-3'-phosphorothioate
  modified_base 15: mod_base = OTHER; note = 2'-deoxythymidine-3'-phosphorothioate
  modified_base 16: mod_base = OTHER; note = 2'-O-methylcytidine-3'- phosphorothioate
  modified_base 17: mod_base = OTHER; note = 2'-O-methyladenosine-3'- phosphorothioate
  modified_base 18: mod_base = OTHER; note = 2'-O-methylguanosine-3'- phosphorothioate
  modified_base 19: mod_base = OTHER; note = 2'-O-methylguanosine-3'- phosphorothioate
  modified_base 20: mod_base = OTHER; note = 2'-O-methyluridine-3'-phosphate
  misc_feature 1..5: note = RNA
  misc_feature 6..15: note = DNA
  misc_feature 16..20: note = RNA
cagttggggcatggtcaggt

SEQ ID NO: 158 - DNA, 20 bp, synthetic construct
  source 1..20: mol_type = other DNA; note = Description of Artificial Sequence: Synthetic oligonucleotide; note = Description of Combined DNA/RNA Molecule: Synthetic oligonucleotide
  modified_base 1: mod_base = OTHER; note = 2'-O-methyluridine-3'-phosphorothioate
  modified_base 2: mod_base = OTHER; note = 2'-O-methyluridine-3'-phosphorothioate
  modified_base 3: mod_base = OTHER; note = 2'-O-methylguanosine-3'- phosphorothioate
  modified_base 4: mod_base = OTHER; note = 2'-O-methylcytidine-3'- phosphorothioate
  modified_base 5: mod_base = OTHER; note = 2'-O-methyladenosine-3'- phosphorothioate
  modified_base 6: mod_base = OTHER; note = 2'-deoxyguanosine-3'-phosphorothioate
  modified_base 7: mod_base = OTHER; note = 5'-methyl-deoxycytidine-3'-phosphorothioate
  modified_base 8: mod_base = OTHER; note = 2'-deoxyadenosine-3'-phosphorothioate
  modified_base 9: mod_base = OTHER; note = 5'-methyl-deoxycytidine-3'-phosphorothioate
  modified_base 10: mod_base = OTHER; note = 5'-methyl-deoxycytidine-3'-phosphorothioate
  modified_base 11: mod_base = OTHER; note = 2'-deoxyadenosine-3'-phosphorothioate
  modified_base 12: mod_base = OTHER; note = 2'-deoxyguanosine-3'-phosphorothioate
  modified_base 13: mod_base = OTHER; note = 2'-deoxythymidine-3'-phosphorothioate
  modified_base 14: mod_base = OTHER; note = 2'-deoxythymidine-3'-phosphorothioate
  modified_base 15: mod_base = OTHER; note = 2'-deoxyguanosine-3'-phosphorothioate
  modified_base 16: mod_base = OTHER; note = 2'-O-methylguanosine-3'- phosphorothioate
  modified_base 17: mod_base = OTHER; note = 2'-O-methylguanosine-3'- phosphorothioate
  modified_base 18: mod_base = OTHER; note = 2'-O-methylguanosine-3'- phosphorothioate
  modified_base 19: mod_base = OTHER; note = 2'-O-methylcytidine-3'- phosphorothioate
  modified_base 20: mod_base = OTHER; note = 2'-O-methyladenosine-3'-phosphate
  misc_feature 1..5: note = RNA
  misc_feature 6..15: note = DNA
  misc_feature 16..20: note = RNA
ttgcagcaccagttggggca

SEQ ID NO: 159 - DNA, 20 bp, synthetic construct
  source 1..20: mol_type = other DNA; note = Description of Artificial Sequence: Synthetic oligonucleotide; note = Description of Combined DNA/RNA Molecule: Synthetic oligonucleotide
  modified_base 1: mod_base = OTHER; note = 2'-O-methylguanosine-3'- phosphorothioate
  modified_base 2: mod_base = OTHER; note = 2'-O-methyluridine-3'-phosphorothioate
  modified_base 3: mod_base = OTHER; note = 2'-O-methylcytidine-3'- phosphorothioate
  modified_base 4: mod_base = OTHER; note = 2'-O-methyladenosine-3'- phosphorothioate
  modified_base 5: mod_base = OTHER; note = 2'-O-methyluridine-3'-phosphorothioate
  modified_base 6: mod_base = OTHER; note = 2'-deoxyadenosine-3'-phosphorothioate
  modified_base 7: mod_base = OTHER; note = 2'-deoxyadenosine-3'-phosphorothioate
  modified_base 8: mod_base = OTHER; note = 2'-deoxyguanosine-3'-phosphorothioate
  modified_base 9: mod_base = OTHER; note = 2'-deoxyadenosine-3'-phosphorothioate
  modified_base 10: mod_base = OTHER; note = 2'-deoxythymidine-3'-phosphorothioate
  modified_base 11: mod_base = OTHER; note = 5'-methyl-deoxycytidine-3'-phosphorothioate
  modified_base 12: mod_base = OTHER; note = 5'-methyl-deoxycytidine-3'-phosphorothioate
  modified_base 13: mod_base = OTHER; note = 2'-deoxythymidine-3'-phosphorothioate
  modified_base 14: mod_base = OTHER; note = 2'-deoxythymidine-3'-phosphorothioate
  modified_base 15: mod_base = OTHER; note = 2'-deoxyguanosine-3'-phosphorothioate
  modified_base 16: mod_base = OTHER; note = 2'-O-methylcytidine-3'- phosphorothioate
  modified_base 17: mod_base = OTHER; note = 2'-O-methyladenosine-3'- phosphorothioate
  modified_base 18: mod_base = OTHER; note = 2'-O-methylguanosine-3'- phosphorothioate
  modified_base 19: mod_base = OTHER; note = 2'-O-methylcytidine-3'- phosphorothioate
  modified_base 20: mod_base = OTHER; note = 2'-O-methyladenosine-3'-phosphate
  misc_feature 1..5: note = RNA
  misc_feature 6..15: note = DNA
  misc_feature 16..20: note = RNA
gtcataagatccttgcagca

SEQ ID NO: 160 - DNA, 20 bp, synthetic construct
  source 1..20: mol_type = other DNA; note = Description of Artificial Sequence: Synthetic oligonucleotide; note = Description of Combined DNA/RNA Molecule: Synthetic oligonucleotide
  modified_base 1: mod_base = OTHER; note = 2'-O-methyladenosine-3'- phosphorothioate
  modified_base 2: mod_base = OTHER; note = 2'-O-methylguanosine-3'- phosphorothioate
  modified_base 3: mod_base = OTHER; note = 2'-O-methylguanosine-3'- phosphorothioate
  modified_base 4: mod_base = OTHER; note = 2'-O-methyluridine-3'-phosphorothioate
  modified_base 5: mod_base = OTHER; note = 2'-O-methylcytidine-3'- phosphorothioate
  modified_base 6: mod_base = OTHER; note = 5'-methyl-deoxycytidine-3'-phosphorothioate
  modified_base 7: mod_base = OTHER; note = 2'-deoxythymidine-3'-phosphorothioate
  modified_base 8: mod_base = OTHER; note = 2'-deoxyguanosine-3'-phosphorothioate
  modified_base 9: mod_base = OTHER; note = 5'-methyl-deoxycytidine-3'-phosphorothioate
  modified_base 10: mod_base = OTHER; note = 2'-deoxyadenosine-3'-phosphorothioate
  modified_base 11: mod_base = OTHER; note = 2'-deoxyguanosine-3'-phosphorothioate
  modified_base 12: mod_base = OTHER; note = 2'-deoxyguanosine-3'-phosphorothioate
  modified_base 13: mod_base = OTHER; note = 2'-deoxythymidine-3'-phosphorothioate
  modified_base 14: mod_base = OTHER; note = 5'-methyl-deoxycytidine-3'-phosphorothioate
  modified_base 15: mod_base = OTHER; note = 2'-deoxyadenosine-3'-phosphorothioate
  modified_base 16: mod_base = OTHER; note = 2'-O-methyluridine-3'-phosphorothioate
  modified_base 17: mod_base = OTHER; note = 2'-O-methyladenosine-3'- phosphorothioate
  modified_base 18: mod_base = OTHER; note = 2'-O-methyladenosine-3'- phosphorothioate
  modified_base 19: mod_base = OTHER; note = 2'-O-methylguanosine-3'- phosphorothioate
  modified_base 20: mod_base = OTHER; note = 2'-O-methyladenosine-3'-phosphate
  misc_feature 1..5: note = RNA
  misc_feature 6..15: note = DNA
  misc_feature 16..20: note = RNA
aggtcctgcaggtcataaga

SEQ ID NO: 161 - DNA, 20 bp, synthetic construct
  source 1..20: mol_type = other DNA; note = Description of Artificial Sequence: Synthetic oligonucleotide; note = Description of Combined DNA/RNA Molecule: Synthetic oligonucleotide
  modified_base 1: mod_base = OTHER; note = 2'-O-methylcytidine-3'- phosphorothioate
  modified_base 2: mod_base = OTHER; note = 2'-O-methyluridine-3'-phosphorothioate
  modified_base 3: mod_base = OTHER; note = 2'-O-methylguanosine-3'- phosphorothioate
  modified_base 4: mod_base = OTHER; note = 2'-O-methylguanosine-3'- phosphorothioate
  modified_base 5: mod_base = OTHER; note = 2'-O-methylguanosine-3'- phosphorothioate
  modified_base 6: mod_base = OTHER; note = 5'-methyl-deoxycytidine-3'-phosphorothioate
  modified_base 7: mod_base = OTHER; note = 2'-deoxyguanosine-3'-phosphorothioate
  modified_base 8: mod_base = OTHER; note = 2'-deoxyadenosine-3'-phosphorothioate
  modified_base 9: mod_base = OTHER; note = 2'-deoxyguanosine-3'-phosphorothioate
  modified_base 10: mod_base = OTHER; note = 5'-methyl-deoxycytidine-3'-phosphorothioate
  modified_base 11: mod_base = OTHER; note = 2'-deoxyadenosine-3'-phosphorothioate
  modified_base 12: mod_base = OTHER; note = 2'-deoxyguanosine-3'-phosphorothioate
  modified_base 13: mod_base = OTHER; note = 2'-deoxyguanosine-3'-phosphorothioate
  modified_base 14: mod_base = OTHER; note = 2'-deoxythymidine-3'-phosphorothioate
  modified_base 15: mod_base = OTHER; note = 5'-methyl-deoxycytidine-3'-phosphorothioate
  modified_base 16: mod_base = OTHER; note = 2'-O-methylcytidine-3'- phosphorothioate
  modified_base 17: mod_base = OTHER; note = 2'-O-methyluridine-3'-phosphorothioate
  modified_base 18: mod_base = OTHER; note = 2'-O-methylguanosine-3'- phosphorothioate
  modified_base 19: mod_base = OTHER; note = 2'-O-methylcytidine-3'- phosphorothioate
  modified_base 20: mod_base = OTHER; note = 2'-O-methyladenosine-3'-phosphate
  misc_feature 1..5: note = RNA
  misc_feature 6..15: note = DNA
  misc_feature 16..20: note = RNA
ctgggcgagcaggtcctgca

SEQ ID NO: 162 - DNA, 20 bp, synthetic construct
  source 1..20: mol_type = other DNA; note = Description of Artificial Sequence: Synthetic oligonucleotide; note = Description of Combined DNA/RNA Molecule: Synthetic oligonucleotide
  modified_base 1: mod_base = OTHER; note = 2'-O-methylguanosine-3'- phosphorothioate
  modified_base 2: mod_base = OTHER; note = 2'-O-methylguanosine-3'- phosphorothioate
  modified_base 3: mod_base = OTHER; note = 2'-O-methylguanosine-3'- phosphorothioate
  modified_base 4: mod_base = OTHER; note = 2'-O-methylcytidine-3'- phosphorothioate
  modified_base 5: mod_base = OTHER; note = 2'-O-methyladenosine-3'- phosphorothioate
  modified_base 6: mod_base = OTHER; note = 2'-deoxyguanosine-3'-phosphorothioate
  modified_base 7: mod_base = OTHER; note = 5'-methyl-deoxycytidine-3'-phosphorothioate
  modified_base 8: mod_base = OTHER; note = 2'-deoxythymidine-3'-phosphorothioate
  modified_base 9: mod_base = OTHER; note = 5'-methyl-deoxycytidine-3'-phosphorothioate
  modified_base 10: mod_base = OTHER; note = 2'-deoxyadenosine-3'-phosphorothioate
  modified_base 11: mod_base = OTHER; note = 2'-deoxyguanosine-3'-phosphorothioate
  modified_base 12: mod_base = OTHER; note = 5'-methyl-deoxycytidine-3'-phosphorothioate
  modified_base 13: mod_base = OTHER; note = 5'-methyl-deoxycytidine-3'-phosphorothioate
  modified_base 14: mod_base = OTHER; note = 2'-deoxythymidine-3'-phosphorothioate
  modified_base 15: mod_base = OTHER; note = 2'-deoxyguanosine-3'-phosphorothioate
  modified_base 16: mod_base = OTHER; note = 2'-O-methylguanosine-3'- phosphorothioate
  modified_base 17: mod_base = OTHER; note = 2'-O-methylguanosine-3'- phosphorothioate
  modified_base 18: mod_base = OTHER; note = 2'-O-methylcytidine-3'- phosphorothioate
  modified_base 19: mod_base = OTHER; note = 2'-O-methylguanosine-3'- phosphorothioate
  modified_base 20: mod_base = OTHER; note = 2'-O-methyladenosine-3'-phosphate
  misc_feature 1..5: note = RNA
  misc_feature 6..15: note = DNA
  misc_feature 16..20: note = RNA
gggcagctcagcctgggcga

SEQ ID NO: 163 - DNA, 20 bp, synthetic construct
  source 1..20: mol_type = other DNA; note = Description of Artificial Sequence: Synthetic oligonucleotide; note = Description of Combined DNA/RNA Molecule: Synthetic oligonucleotide
  modified_base 1: mod_base = OTHER; note = 2'-O-methylguanosine-3'- phosphorothioate
  modified_base 2: mod_base = OTHER; note = 2'-O-methylcytidine-3'- phosphorothioate
  modified_base 3: mod_base = OTHER; note = 2'-O-methyladenosine-3'- phosphorothioate
  modified_base 4: mod_base = OTHER; note = 2'-O-methylguanosine-3'- phosphorothioate
  modified_base 5: mod_base = OTHER; note = 2'-O-methyladenosine-3'- phosphorothioate
  modified_base 6: mod_base = OTHER; note = 2'-deoxyadenosine-3'-phosphorothioate
  modified_base 7: mod_base = OTHER; note = 2'-deoxythymidine-3'-phosphorothioate
  modified_base 8: mod_base = OTHER; note = 2'-deoxyguanosine-3'-phosphorothioate
  modified_base 9: mod_base = OTHER; note = 2'-deoxyguanosine-3'-phosphorothioate
  modified_base 10: mod_base = OTHER; note = 5'-methyl-deoxycytidine-3'-phosphorothioate
  modified_base 11: mod_base = OTHER; note = 2'-deoxyguanosine-3'-phosphorothioate
  modified_base 12: mod_base = OTHER; note = 2'-deoxyguanosine-3'-phosphorothioate
  modified_base 13: mod_base = OTHER; note = 2'-deoxyguanosine-3'-phosphorothioate
  modified_base 14: mod_base = OTHER; note = 5'-methyl-deoxycytidine-3'-phosphorothioate
  modified_base 15: mod_base = OTHER; note = 2'-deoxyadenosine-3'-phosphorothioate
  modified_base 16: mod_base = OTHER; note = 2'-O-methylguanosine-3'- phosphorothioate
  modified_base 17: mod_base = OTHER; note = 2'-O-methylcytidine-3'- phosphorothioate
  modified_base 18: mod_base = OTHER; note = 2'-O-methyluridine-3'-phosphorothioate
  modified_base 19: mod_base = OTHER; note = 2'-O-methylcytidine-3'- phosphorothioate
  modified_base 20: mod_base = OTHER; note = 2'-O-methyladenosine-3'-phosphate
  misc_feature 1..5: note = RNA
  misc_feature 6..15: note = DNA
  misc_feature 16..20: note = RNA
gcagaatggcgggcagctca

SEQ ID NO: 164 - DNA, 20 bp, synthetic construct
  source 1..20: mol_type = other DNA; note = Description of Artificial Sequence: Synthetic oligonucleotide; note = Description of Combined DNA/RNA Molecule: Synthetic oligonucleotide
  modified_base 1: mod_base = OTHER; note = 2'-O-methylcytidine-3'- phosphorothioate
  modified_base 2: mod_base = OTHER; note = 2'-O-methyladenosine-3'- phosphorothioate
  modified_base 3: mod_base = OTHER; note = 2'-O-methylguanosine-3'- phosphorothioate
  modified_base 4: mod_base = OTHER; note = 2'-O-methylcytidine-3'- phosphorothioate
  modified_base 5: mod_base = OTHER; note = 2'-O-methyluridine-3'-phosphorothioate
  modified_base 6: mod_base = OTHER; note = 5'-methyl-deoxycytidine-3'-phosphorothioate
  modified_base 7: mod_base = OTHER; note = 2'-deoxyguanosine-3'-phosphorothioate
  modified_base 8: mod_base = OTHER; note = 2'-deoxyguanosine-3'-phosphorothioate
  modified_base 9: mod_base = OTHER; note = 2'-deoxythymidine-3'-phosphorothioate
  modified_base 10: mod_base = OTHER; note = 2'-deoxyguanosine-3'-phosphorothioate
  modified_base 11: mod_base = OTHER; note = 2'-deoxythymidine-3'-phosphorothioate
  modified_base 12: mod_base = OTHER; note = 2'-deoxyguanosine-3'-phosphorothioate
  modified_base 13: mod_base = OTHER; note = 5'-methyl-deoxycytidine-3'-phosphorothioate
  modified_base 14: mod_base = OTHER; note = 2'-deoxyadenosine-3'-phosphorothioate
  modified_base 15: mod_base = OTHER; note = 2'-deoxyguanosine-3'-phosphorothioate
  modified_base 16: mod_base = OTHER; note = 2'-O-methyladenosine-3'- phosphorothioate
  modified_base 17: mod_base = OTHER; note = 2'-O-methyladenosine-3'- phosphorothioate
  modified_base 18: mod_base = OTHER; note = 2'-O-methyluridine-3'-phosphorothioate
  modified_base 19: mod_base = OTHER; note = 2'-O-methylguanosine-3'- phosphorothioate
  modified_base 20: mod_base = OTHER; note = 2'-O-methylguanosine-3'-phosphate
  misc_feature 1..5: note = RNA
  misc_feature 6..15: note = DNA
  misc_feature 16..20: note = RNA
cagctcggtgtgcagaatgg

SEQ ID NO: 165 - DNA, 20 bp, synthetic construct
  source 1..20: mol_type = other DNA; note = Description of Artificial Sequence: Synthetic oligonucleotide; note = Description of Combined DNA/RNA Molecule: Synthetic oligonucleotide
  modified_base 1: mod_base = OTHER; note = 2'-O-methyluridine-3'-phosphorothioate
  modified_base 2: mod_base = OTHER; note = 2'-O-methyluridine-3'-phosphorothioate
  modified_base 3: mod_base = OTHER; note = 2'-O-methyluridine-3'-phosphorothioate
  modified_base 4: mod_base = OTHER; note = 2'-O-methyluridine-3'-phosphorothioate
  modified_base 5: mod_base = OTHER; note = 2'-O-methylguanosine-3'- phosphorothioate
  modified_base 6: mod_base = OTHER; note = 5'-methyl-deoxycytidine-3'-phosphorothioate
  modified_base 7: mod_base = OTHER; note = 2'-deoxyadenosine-3'-phosphorothioate
  modified_base 8: mod_base = OTHER; note = 2'-deoxyguanosine-3'-phosphorothioate
  modified_base 9: mod_base = OTHER; note = 2'-deoxyguanosine-3'-phosphorothioate
  modified_base 10: mod_base = OTHER; note = 2'-deoxythymidine-3'-phosphorothioate
  modified_base 11: mod_base = OTHER; note = 2'-deoxythymidine-3'-phosphorothioate
  modified_base 12: mod_base = OTHER; note = 5'-methyl-deoxycytidine-3'-phosphorothioate
  modified_base 13: mod_base = OTHER; note = 2'-deoxyadenosine-3'-phosphorothioate
  modified_base 14: mod_base = OTHER; note = 2'-deoxyguanosine-3'-phosphorothioate
  modified_base 15: mod_base = OTHER; note = 5'-methyl-deoxycytidine-3'-phosphorothioate
  modified_base 16: mod_base = OTHER; note = 2'-O-methyluridine-3'-phosphorothioate
  modified_base 17: mod_base = OTHER; note = 2'-O-methylcytidine-3'- phosphorothioate
  modified_base 18: mod_base = OTHER; note = 2'-O-methylguanosine-3'- phosphorothioate
  modified_base 19: mod_base = OTHER; note = 2'-O-methylguanosine-3'- phosphorothioate
  modified_base 20: mod_base = OTHER; note = 2'-O-methyluridine-3'-phosphate
  misc_feature 1..5: note = RNA
  misc_feature 6..15: note = DNA
  misc_feature 16..20: note = RNA
ttttgcaggttcagctcggt

SEQ ID NO: 166 - DNA, 20 bp, synthetic construct
  source 1..20: mol_type = other DNA; note = Description of Artificial Sequence: Synthetic oligonucleotide; note = Description of Combined DNA/RNA Molecule: Synthetic oligonucleotide
  modified_base 1: mod_base = OTHER; note = 2'-O-methylguanosine-3'- phosphorothioate
  modified_base 2: mod_base = OTHER; note = 2'-O-methyluridine-3'-phosphorothioate
  modified_base 3: mod_base = OTHER; note = 2'-O-methylcytidine-3'- phosphorothioate
  modified_base 4: mod_base = OTHER; note = 2'-O-methyladenosine-3'- phosphorothioate
  modified_base 5: mod_base = OTHER; note = 2'-O-methyluridine-3'-phosphorothioate
  modified_base 6: mod_base = OTHER; note = 2'-deoxythymidine-3'-phosphorothioate
  modified_base 7: mod_base = OTHER; note = 2'-deoxyguanosine-3'-phosphorothioate
  modified_base 8: mod_base = OTHER; note = 5'-methyl-deoxycytidine-3'-phosphorothioate
  modified_base 9: mod_base = OTHER; note = 2'-deoxythymidine-3'-phosphorothioate
  modified_base 10: mod_base = OTHER; note = 5'-methyl-deoxycytidine-3'-phosphorothioate
  modified_base 11: mod_base = OTHER; note = 2'-deoxyadenosine-3'-phosphorothioate
  modified_base 12: mod_base = OTHER; note = 2'-deoxyadenosine-3'-phosphorothioate
  modified_base 13: mod_base = OTHER; note = 2'-deoxythymidine-3'-phosphorothioate
  modified_base 14: mod_base = OTHER; note = 2'-deoxythymidine-3'-phosphorothioate
  modified_base 15: mod_base = OTHER; note = 2'-deoxythymidine-3'-phosphorothioate
  modified_base 16: mod_base = OTHER; note = 2'-O-methyluridine-3'-phosphorothioate
  modified_base 17: mod_base = OTHER; note = 2'-O-methyluridine-3'-phosphorothioate
  modified_base 18: mod_base = OTHER; note = 2'-O-methylguanosine-3'- phosphorothioate
  modified_base 19: mod_base = OTHER; note = 2'-O-methylcytidine-3'- phosphorothioate
  modified_base 20: mod_base = OTHER; note = 2'-O-methyladenosine-3'-phosphate
  misc_feature 1..5: note = RNA
  misc_feature 6..15: note = DNA
  misc_feature 16..20: note = RNA
gtcattgctcaatttttgca

SEQ ID NO: 167 - DNA, 20 bp, synthetic construct
  source 1..20: mol_type = other DNA; note = Description of Artificial Sequence: Synthetic oligonucleotide; note = Description of Combined DNA/RNA Molecule: Synthetic oligonucleotide
  modified_base 1: mod_base = OTHER; note = 2'-O-methyladenosine-3'- phosphorothioate
  modified_base 2: mod_base = OTHER; note = 2'-O-methylcytidine-3'- phosphorothioate
  modified_base 3: mod_base = OTHER; note = 2'-O-methylcytidine-3'- phosphorothioate
  modified_base 4: mod_base = OTHER; note = 2'-O-methylcytidine-3'- phosphorothioate
  modified_base 5: mod_base = OTHER; note = 2'-O-methyluridine-3'-phosphorothioate
  modified_base 6: mod_base = OTHER; note = 2'-deoxyguanosine-3'-phosphorothioate
  modified_base 7: mod_base = OTHER; note = 2'-deoxyadenosine-3'-phosphorothioate
  modified_base 8: mod_base = OTHER; note = 2'-deoxythymidine-3'-phosphorothioate
  modified_base 9: mod_base = OTHER; note = 2'-deoxyguanosine-3'-phosphorothioate
  modified_base 10: mod_base = OTHER; note = 5'-methyl-deoxycytidine-3'-phosphorothioate
  modified_base 11: mod_base = OTHER; note = 2'-deoxyguanosine-3'-phosphorothioate
  modified_base 12: mod_base = OTHER; note = 2'-deoxyguanosine-3'-phosphorothioate
  modified_base 13: mod_base = OTHER; note = 2'-deoxythymidine-3'-phosphorothioate
  modified_base 14: mod_base = OTHER; note = 5'-methyl-deoxycytidine-3'-phosphorothioate
  modified_base 15: mod_base = OTHER; note = 2'-deoxyadenosine-3'-phosphorothioate
  modified_base 16: mod_base = OTHER; note = 2'-O-methyluridine-3'-phosphorothioate
  modified_base 17: mod_base = OTHER; note = 2'-O-methyluridine-3'-phosphorothioate
  modified_base 18: mod_base = OTHER; note = 2'-O-methylguanosine-3'- phosphorothioate
  modified_base 19: mod_base = OTHER; note = 2'-O-methylcytidine-3'- phosphorothioate
  modified_base 20: mod_base = OTHER; note = 2'-O-methyluridine-3'-phosphate
  misc_feature 1..5: note = RNA
  misc_feature 6..15: note = DNA
  misc_feature 16..20: note = RNA
accctgatgcggtcattgct

SEQ ID NO: 168 - DNA, 20 bp, synthetic construct
  source 1..20: mol_type = other DNA; note = Description of Artificial Sequence: Synthetic oligonucleotide; note = Description of Combined DNA/RNA Molecule: Synthetic oligonucleotide
  modified_base 1: mod_base = OTHER; note = 2'-O-methylguanosine-3'- phosphorothioate
  modified_base 2: mod_base = OTHER; note = 2'-O-methylcytidine-3'- phosphorothioate
  modified_base 3: mod_base = OTHER; note = 2'-O-methyladenosine-3'- phosphorothioate
  modified_base 4: mod_base = OTHER; note = 2'-O-methylcytidine-3'- phosphorothioate
  modified_base 5: mod_base = OTHER; note = 2'-O-methylcytidine-3'- phosphorothioate
  modified_base 6: mod_base = OTHER; note = 2'-deoxythymidine-3'-phosphorothioate
  modified_base 7: mod_base = OTHER; note = 5'-methyl-deoxycytidine-3'-phosphorothioate
  modified_base 8: mod_base = OTHER; note = 5'-methyl-deoxycytidine-3'-phosphorothioate
  modified_base 9: mod_base = OTHER; note = 5'-methyl-deoxycytidine-3'-phosphorothioate
  modified_base 10: mod_base = OTHER; note = 5'-methyl-deoxycytidine-3'-phosphorothioate
  modified_base 11: mod_base = OTHER; note = 5'-methyl-deoxycytidine-3'-phosphorothioate
  modified_base 12: mod_base = OTHER; note = 2'-deoxyadenosine-3'-phosphorothioate
  modified_base 13: mod_base = OTHER; note = 5'-methyl-deoxycytidine-3'-phosphorothioate
  modified_base 14: mod_base = OTHER; note = 5'-methyl-deoxycytidine-3'-phosphorothioate
  modified_base 15: mod_base = OTHER; note = 5'-methyl-deoxycytidine-3'-phosphorothioate
  modified_base 16: mod_base = OTHER; note = 2'-O-methyluridine-3'-phosphorothioate
  modified_base 17: mod_base = OTHER; note = 2'-O-methylguanosine-3'- phosphorothioate
  modified_base 18: mod_base = OTHER; note = 2'-O-methyladenosine-3'- phosphorothioate
  modified_base 19: mod_base = OTHER; note = 2'-O-methyluridine-3'-phosphorothioate
  modified_base 20: mod_base = OTHER; note = 2'-O-methylguanosine-3'-phosphate
  misc_feature 1..5: note = RNA
  misc_feature 6..15: note = DNA
  misc_feature 16..20: note = RNA
gcacctcccccaccctgatg

SEQ ID NO: 169 - DNA, 20 bp, synthetic construct
  source 1..20: mol_type = other DNA; note = Description of Artificial Sequence: Synthetic oligonucleotide; note = Description of Combined DNA/RNA Molecule: Synthetic oligonucleotide
  modified_base 1: mod_base = OTHER; note = 2'-O-methyladenosine-3'- phosphorothioate
  modified_base 2: mod_base = OTHER; note = 2'-O-methyluridine-3'-phosphorothioate
  modified_base 3: mod_base = OTHER; note = 2'-O-methylguanosine-3'- phosphorothioate
  modified_base 4: mod_base = OTHER; note = 2'-O-methylcytidine-3'- phosphorothioate
  modified_base 5: mod_base = OTHER; note = 2'-O-methyluridine-3'-phosphorothioate
  modified_base 6: mod_base = OTHER; note = 2'-deoxyguanosine-3'-phosphorothioate
  modified_base 7: mod_base = OTHER; note = 2'-deoxythymidine-3'-phosphorothioate
  modified_base 8: mod_base = OTHER; note = 2'-deoxythymidine-3'-phosphorothioate
  modified_base 9: mod_base = OTHER; note = 5'-methyl-deoxycytidine-3'-phosphorothioate
  modified_base 10: mod_base = OTHER; note = 2'-deoxyadenosine-3'-phosphorothioate
  modified_base 11: mod_base = OTHER; note = 2'-deoxyguanosine-3'-phosphorothioate
  modified_base 12: mod_base = OTHER; note = 5'-methyl-deoxycytidine-3'-phosphorothioate
  modified_base 13: mod_base = OTHER; note = 2'-deoxyadenosine-3'-phosphorothioate
  modified_base 14: mod_base = OTHER; note = 5'-methyl-deoxycytidine-3'-phosphorothioate
  modified_base 15: mod_base = OTHER; note = 5'-methyl-deoxycytidine-3'-phosphorothioate
  modified_base 16: mod_base = OTHER; note = 2'-O-methyluridine-3'-phosphorothioate
  modified_base 17: mod_base = OTHER; note = 2'-O-methylcytidine-3'- phosphorothioate
  modified_base 18: mod_base = OTHER; note = 2'-O-methylcytidine-3'- phosphorothioate
  modified_base 19: mod_base = OTHER; note = 2'-O-methylcytidine-3'- phosphorothioate
  modified_base 20: mod_base = OTHER; note = 2'-O-methylcytidine-3'-phosphate
  misc_feature 1..5: note = RNA
  misc_feature 6..15: note = DNA
  misc_feature 16..20: note = RNA
atgctgttcagcacctcccc

SEQ ID NO: 170 - DNA, 20 bp, synthetic construct
  source 1..20: mol_type = other DNA; note = Description of Artificial Sequence: Synthetic oligonucleotide; note = Description of Combined DNA/RNA Molecule: Synthetic oligonucleotide
  modified_base 1: mod_base = OTHER; note = 2'-O-methyladenosine-3'- phosphorothioate
  modified_base 2: mod_base = OTHER; note = 2'-O-methylguanosine-3'- phosphorothioate
  modified_base 3: mod_base = OTHER; note = 2'-O-methylcytidine-3'- phosphorothioate
  modified_base 4: mod_base = OTHER; note = 2'-O-methyluridine-3'-phosphorothioate
  modified_base 5: mod_base = OTHER; note = 2'-O-methylcytidine-3'- phosphorothioate
  modified_base 6: mod_base = OTHER; note = 2'-deoxyadenosine-3'-phosphorothioate
  modified_base 7: mod_base = OTHER; note = 2'-deoxyadenosine-3'-phosphorothioate
  modified_base 8: mod_base = OTHER; note = 2'-deoxyadenosine-3'-phosphorothioate
  modified_base 9: mod_base = OTHER; note = 2'-deoxyadenosine-3'-phosphorothioate
  modified_base 10: mod_base = OTHER; note = 2'-deoxyadenosine-3'-phosphorothioate
  modified_base 11: mod_base = OTHER; note = 2'-deoxyadenosine-3'-phosphorothioate
  modified_base 12: mod_base = OTHER; note = 2'-deoxyadenosine-3'-phosphorothioate
  modified_base 13: mod_base = OTHER; note = 2'-deoxyadenosine-3'-phosphorothioate
  modified_base 14: mod_base = OTHER; note = 2'-deoxythymidine-3'-phosphorothioate
  modified_base 15: mod_base = OTHER; note = 2'-deoxyguanosine-3'-phosphorothioate
  modified_base 16: mod_base = OTHER; note = 2'-O-methylcytidine-3'- phosphorothioate
  modified_base 17: mod_base = OTHER; note = 2'-O-methyluridine-3'-phosphorothioate
  modified_base 18: mod_base = OTHER; note = 2'-O-methylguanosine-3'- phosphorothioate
  modified_base 19: mod_base = OTHER; note = 2'-O-methyluridine-3'-phosphorothioate
  modified_base 20: mod_base = OTHER; note = 2'-O-methyluridine-3'-phosphate
  misc_feature 1..5: note = RNA
  misc_feature 6..15: note = DNA
  misc_feature 16..20: note = RNA
agctcaaaaaaaatgctgtt

SEQ ID NO: 171 - DNA, 20 bp, synthetic construct
  source 1..20: mol_type = other DNA; note = Description of Artificial Sequence: Synthetic oligonucleotide; note = Description of Combined DNA/RNA Molecule: Synthetic oligonucleotide
  modified_base 1: mod_base = OTHER; note = 2'-O-methyladenosine-3'- phosphorothioate
  modified_base 2: mod_base = OTHER; note = 2'-O-methyluridine-3'-phosphorothioate
  modified_base 3: mod_base = OTHER; note = 2'-O-methylcytidine-3'- phosphorothioate
  modified_base 4: mod_base = OTHER; note = 2'-O-methylcytidine-3'- phosphorothioate
  modified_base 5: mod_base = OTHER; note = 2'-O-methylguanosine-3'- phosphorothioate
  modified_base 6: mod_base = OTHER; note = 5'-methyl-deoxycytidine-3'-phosphorothioate
  modified_base 7: mod_base = OTHER; note = 2'-deoxythymidine-3'-phosphorothioate
  modified_base 8: mod_base = OTHER; note = 2'-deoxythymidine-3'-phosphorothioate
  modified_base 9: mod_base = OTHER; note = 5'-methyl-deoxycytidine-3'-phosphorothioate
  modified_base 10: mod_base = OTHER; note = 2'-deoxyadenosine-3'-phosphorothioate
  modified_base 11: mod_base = OTHER; note = 2'-deoxyadenosine-3'-phosphorothioate
  modified_base 12: mod_base = OTHER; note = 2'-deoxyguanosine-3'-phosphorothioate
  modified_base 13: mod_base = OTHER; note = 5'-methyl-deoxycytidine-3'-phosphorothioate
  modified_base 14: mod_base = OTHER; note = 2'-deoxythymidine-3'-phosphorothioate
  modified_base 15: mod_base = OTHER; note = 5'-methyl-deoxycytidine-3'-phosphorothioate
  modified_base 16: mod_base = OTHER; note = 2'-O-methyladenosine-3'- phosphorothioate
  modified_base 17: mod_base = OTHER; note = 2'-O-methyladenosine-3'- phosphorothioate
  modified_base 18: mod_base = OTHER; note = 2'-O-methyladenosine-3'- phosphorothioate
  modified_base 19: mod_base = OTHER; note = 2'-O-methyladenosine-3'- phosphorothioate
  modified_base 20: mod_base = OTHER; note = 2'-O-methyladenosine-3'-phosphate
  misc_feature 1..5: note = RNA
  misc_feature 6..15: note = DNA
  misc_feature 16..20: note = RNA
atccgcttcaagctcaaaaa

SEQ ID NO: 172 - DNA, 20 bp, synthetic construct
  source 1..20: mol_type = other DNA; note = Description of Artificial Sequence: Synthetic oligonucleotide; note = Description of Combined DNA/RNA Molecule: Synthetic oligonucleotide
  modified_base 1: mod_base = OTHER; note = 2'-O-methylguanosine-3'- phosphorothioate
  modified_base 2: mod_base = OTHER; note = 2'-O-methylguanosine-3'- phosphorothioate
  modified_base 3: mod_base = OTHER; note = 2'-O-methylguanosine-3'- phosphorothioate
  modified_base 4: mod_base = OTHER; note = 2'-O-methylcytidine-3'- phosphorothioate
  modified_base 5: mod_base = OTHER; note = 2'-O-methyluridine-3'-phosphorothioate
  modified_base 6: mod_base = OTHER; note = 5'-methyl-deoxycytidine-3'-phosphorothioate
  modified_base 7: mod_base = OTHER; note = 2'-deoxythymidine-3'-phosphorothioate
  modified_base 8: mod_base = OTHER; note = 5'-methyl-deoxycytidine-3'-phosphorothioate
  modified_base 9: mod_base = OTHER; note = 2'-deoxythymidine-3'-phosphorothioate
  modified_base 10: mod_base = OTHER; note = 5'-methyl-deoxycytidine-3'-phosphorothioate
  modified_base 11: mod_base = OTHER; note = 2'-deoxythymidine-3'-phosphorothioate
  modified_base 12: mod_base = OTHER; note = 5'-methyl-deoxycytidine-3'-phosphorothioate
  modified_base 13: mod_base = OTHER; note = 2'-deoxyadenosine-3'-phosphorothioate
  modified_base 14: mod_base = OTHER; note = 2'-deoxythymidine-3'-phosphorothioate
  modified_base 15: mod_base = OTHER; note = 5'-methyl-deoxycytidine-3'-phosphorothioate
  modified_base 16: mod_base = OTHER; note = 2'-O-methylcytidine-3'- phosphorothioate
  modified_base 17: mod_base = OTHER; note = 2'-O-methylguanosine-3'- phosphorothioate
  modified_base 18: mod_base = OTHER; note = 2'-O-methylcytidine-3'- phosphorothioate
  modified_base 19: mod_base = OTHER; note = 2'-O-methyluridine-3'-phosphorothioate
  modified_base 20: mod_base = OTHER; note = 2'-O-methyluridine-3'-phosphate
  misc_feature 1..5: note = RNA
  misc_feature 6..15: note = DNA
  misc_feature 16..20: note = RNA
gggctctctctcatccgctt

SEQ ID NO: 173 - DNA, 20 bp, synthetic construct
  source 1..20: mol_type = other DNA; note = Description of Artificial Sequence: Synthetic oligonucleotide; note = Description of Combined DNA/RNA Molecule: Synthetic oligonucleotide
  modified_base 1: mod_base = OTHER; note = 2'-O-methyladenosine-3'- phosphorothioate
  modified_base 2: mod_base = OTHER; note = 2'-O-methylguanosine-3'- phosphorothioate
  modified_base 3: mod_base = OTHER; note = 2'-O-methyladenosine-3'- phosphorothioate
  modified_base 4: mod_base = OTHER; note = 2'-O-methylcytidine-3'- phosphorothioate
  modified_base 5: mod_base = OTHER; note = 2'-O-methyluridine-3'-phosphorothioate
  modified_base 6: mod_base = OTHER; note = 5'-methyl-deoxycytidine-3'-phosphorothioate
  modified_base 7: mod_base = OTHER; note = 2'-deoxythymidine-3'-phosphorothioate
  modified_base 8: mod_base = OTHER; note = 2'-deoxyguanosine-3'-phosphorothioate
  modified_base 9: mod_base = OTHER; note = 2'-deoxythymidine-3'-phosphorothioate
  modified_base 10: mod_base = OTHER; note = 2'-deoxyguanosine-3'-phosphorothioate
  modified_base 11: mod_base = OTHER; note = 2'-deoxyguanosine-3'-phosphorothioate
  modified_base 12: mod_base = OTHER; note = 2'-deoxyguanosine-3'-phosphorothioate
  modified_base 13: mod_base = OTHER; note = 5'-methyl-deoxycytidine-3'-phosphorothioate
  modified_base 14: mod_base = OTHER; note = 2'-deoxythymidine-3'-phosphorothioate
  modified_base 15: mod_base = OTHER; note = 5'-methyl-deoxycytidine-3'-phosphorothioate
  modified_base 16: mod_base = OTHER; note = 2'-O-methyluridine-3'-phosphorothioate
  modified_base 17: mod_base = OTHER; note = 2'-O-methylcytidine-3'- phosphorothioate
  modified_base 18: mod_base = OTHER; note = 2'-O-methyluridine-3'-phosphorothioate
  modified_base 19: mod_base = OTHER; note = 2'-O-methylcytidine-3'- phosphorothioate
  modified_base 20: mod_base = OTHER; note = 2'-O-methyluridine-3'-phosphate
  misc_feature 1..5: note = RNA
  misc_feature 6..15: note = DNA
  misc_feature 16..20: note = RNA
agactctgtgggctctctct

SEQ ID NO: 174 - DNA, 20 bp, synthetic construct
  source 1..20: mol_type = other DNA; note = Description of Artificial Sequence: Synthetic oligonucleotide; note = Description of Combined DNA/RNA Molecule: Synthetic oligonucleotide
  modified_base 1: mod_base = OTHER; note = 2'-O-methyluridine-3'-phosphorothioate
  modified_base 2: mod_base = OTHER; note = 2'-O-methyladenosine-3'- phosphorothioate
  modified_base 3: mod_base = OTHER; note = 2'-O-methyladenosine-3'- phosphorothioate
  modified_base 4: mod_base = OTHER; note = 2'-O-methylguanosine-3'- phosphorothioate
  modified_base 5: mod_base = OTHER; note = 2'-O-methylcytidine-3'- phosphorothioate
  modified_base 6: mod_base = OTHER; note = 2'-deoxythymidine-3'-phosphorothioate
  modified_base 7: mod_base = OTHER; note = 2'-deoxyguanosine-3'-phosphorothioate
  modified_base 8: mod_base = OTHER; note = 2'-deoxythymidine-3'-phosphorothioate
  modified_base 9: mod_base = OTHER; note = 2'-deoxythymidine-3'-phosphorothioate
  modified_base 10: mod_base = OTHER; note = 2'-deoxyguanosine-3'-phosphorothioate
  modified_base 11: mod_base = OTHER; note = 2'-deoxyguanosine-3'-phosphorothioate
  modified_base 12: mod_base = OTHER; note = 2'-deoxyguanosine-3'-phosphorothioate
  modified_base 13: mod_base = OTHER; note = 2'-deoxythymidine-3'-phosphorothioate
  modified_base 14: mod_base = OTHER; note = 2'-deoxyadenosine-3'-phosphorothioate
  modified_base 15: mod_base = OTHER; note = 2'-deoxyguanosine-3'-phosphorothioate
  modified_base 16: mod_base = OTHER; note = 2'-O-methyladenosine-3'- phosphorothioate
  modified_base 17: mod_base = OTHER; note = 2'-O-methylcytidine-3'- phosphorothioate
  modified_base 18: mod_base = OTHER; note = 2'-O-methyluridine-3'-phosphorothioate
  modified_base 19: mod_base = OTHER; note = 2'-O-methylcytidine-3'- phosphorothioate
  modified_base 20: mod_base = OTHER; note = 2'-O-methyluridine-3'-phosphate
  misc_feature 1..5: note = RNA
  misc_feature 6..15: note = DNA
  misc_feature 16..20: note = RNA
taagctgttgggtagactct

SEQ ID NO: 175 - DNA, 20 bp, synthetic construct
  source 1..20: mol_type = other DNA; note = Description of Artificial Sequence: Synthetic oligonucleotide; note = Description of Combined DNA/RNA Molecule: Synthetic oligonucleotide
  modified_base 1: mod_base = OTHER; note = 2'-O-methyluridine-3'-phosphorothioate
  modified_base 2: mod_base = OTHER; note = 2'-O-methylcytidine-3'- phosphorothioate
  modified_base 3: mod_base = OTHER; note = 2'-O-methyladenosine-3'- phosphorothioate
  modified_base 4: mod_base = OTHER; note = 2'-O-methylguanosine-3'- phosphorothioate
  modified_base 5: mod_base = OTHER; note = 2'-O-methylguanosine-3'- phosphorothioate
  modified_base 6: mod_base = OTHER; note = 5'-methyl-deoxycytidine-3'-phosphorothioate
  modified_base 7: mod_base = OTHER; note = 2'-deoxythymidine-3'-phosphorothioate
  modified_base 8: mod_base = OTHER; note = 2'-deoxythymidine-3'-phosphorothioate
  modified_base 9: mod_base = OTHER; note = 2'-deoxyguanosine-3'-phosphorothioate
  modified_base 10: mod_base = OTHER; note = 2'-deoxythymidine-3'-phosphorothioate
  modified_base 11: mod_base = OTHER; note = 2'-deoxythymidine-3'-phosphorothioate
  modified_base 12: mod_base = OTHER; note = 2'-deoxyadenosine-3'-phosphorothioate
  modified_base 13: mod_base = OTHER; note = 2'-deoxyadenosine-3'-phosphorothioate
  modified_base 14: mod_base = OTHER; note = 2'-deoxyguanosine-3'-phosphorothioate
  modified_base 15: mod_base = OTHER; note = 5'-methyl-deoxycytidine-3'-phosphorothioate
  modified_base 16: mod_base = OTHER; note = 2'-O-methyluridine-3'-phosphorothioate
  modified_base 17: mod_base = OTHER; note = 2'-O-methylguanosine-3'- phosphorothioate
  modified_base 18: mod_base = OTHER; note = 2'-O-methyluridine-3'-phosphorothioate
  modified_base 19: mod_base = OTHER; note = 2'-O-methyluridine-3'-phosphorothioate
  modified_base 20: mod_base = OTHER; note = 2'-O-methylguanosine-3'-phosphate
  misc_feature 1..5: note = RNA
  misc_feature 6..15: note = DNA
  misc_feature 16..20: note = RNA
tcaggcttgttaagctgttg

SEQ ID NO: 176 - DNA, 20 bp, synthetic construct
  source 1..20: mol_type = other DNA; note = Description of Artificial Sequence: Synthetic oligonucleotide; note = Description of Combined DNA/RNA Molecule: Synthetic oligonucleotide
  modified_base 1: mod_base = OTHER; note = 2'-O-methylcytidine-3'- phosphorothioate
  modified_base 2: mod_base = OTHER; note = 2'-O-methylcytidine-3'- phosphorothioate
  modified_base 3: mod_base = OTHER; note = 2'-O-methyluridine-3'-phosphorothioate
  modified_base 4: mod_base = OTHER; note = 2'-O-methylcytidine-3'- phosphorothioate
  modified_base 5: mod_base = OTHER; note = 2'-O-methylcytidine-3'- phosphorothioate
  modified_base 6: mod_base = OTHER; note = 2'-deoxyadenosine-3'-phosphorothioate
  modified_base 7: mod_base = OTHER; note = 2'-deoxyadenosine-3'-phosphorothioate
  modified_base 8: mod_base = OTHER; note = 2'-deoxyguanosine-3'-phosphorothioate
  modified_base 9: mod_base = OTHER; note = 2'-deoxyadenosine-3'-phosphorothioate
  modified_base 10: mod_base = OTHER; note = 5'-methyl-deoxycytidine-3'-phosphorothioate
  modified_base 11: mod_base = OTHER; note = 5'-methyl-deoxycytidine-3'-phosphorothioate
  modified_base 12: mod_base = OTHER; note = 2'-deoxythymidine-3'-phosphorothioate
  modified_base 13: mod_base = OTHER; note = 5'-methyl-deoxycytidine-3'-phosphorothioate
  modified_base 14: mod_base = OTHER; note = 2'-deoxyadenosine-3'-phosphorothioate
  modified_base 15: mod_base = OTHER; note = 2'-deoxyguanosine-3'-phosphorothioate
  modified_base 16: mod_base = OTHER; note = 2'-O-methylguanosine-3'- phosphorothioate
  modified_base 17: mod_base = OTHER; note = 2'-O-methylcytidine-3'- phosphorothioate
  modified_base 18: mod_base = OTHER; note = 2'-O-methyluridine-3'-phosphorothioate
  modified_base 19: mod_base = OTHER; note = 2'-O-methyluridine-3'-phosphorothioate
  modified_base 20: mod_base = OTHER; note = 2'-O-methylguanosine-3'-phosphate
  misc_feature 1..5: note = RNA
  misc_feature 6..15: note = DNA
  misc_feature 16..20: note = RNA
cctccaagacctcaggcttg

SEQ ID NO: 177 - DNA, 20 bp, synthetic construct
  source 1..20: mol_type = other DNA; note = Description of Artificial Sequence: Synthetic oligonucleotide; note = Description of Combined DNA/RNA Molecule: Synthetic oligonucleotide
  modified_base 1: mod_base = OTHER; note = 2'-O-methylguanosine-3'- phosphorothioate
  modified_base 2: mod_base = OTHER; note = 2'-O-methylguanosine-3'- phosphorothioate
  modified_base 3: mod_base = OTHER; note = 2'-O-methyluridine-3'-phosphorothioate
  modified_base 4: mod_base = OTHER; note = 2'-O-methyluridine-3'-phosphorothioate
  modified_base 5: mod_base = OTHER; note = 2'-O-methylcytidine-3'- phosphorothioate
  modified_base 6: mod_base = OTHER; note = 2'-deoxyadenosine-3'-phosphorothioate
  modified_base 7: mod_base = OTHER; note = 2'-deoxyguanosine-3'-phosphorothioate
  modified_base 8: mod_base = OTHER; note = 2'-deoxyguanosine-3'-phosphorothioate
  modified_base 9: mod_base = OTHER; note = 2'-deoxyguanosine-3'-phosphorothioate
  modified_base 10: mod_base = OTHER; note = 2'-deoxythymidine-3'-phosphorothioate
  modified_base 11: mod_base = OTHER; note = 5'-methyl-deoxycytidine-3'-phosphorothioate
  modified_base 12: mod_base = OTHER; note = 2'-deoxyadenosine-3'-phosphorothioate
  modified_base 13: mod_base = OTHER; note = 5'-methyl-deoxycytidine-3'-phosphorothioate
  modified_base 14: mod_base = OTHER; note = 5'-methyl-deoxycytidine-3'-phosphorothioate
  modified_base 15: mod_base = OTHER; note = 2'-deoxythymidine-3'-phosphorothioate
  modified_base 16: mod_base = OTHER; note = 2'-O-methylcytidine-3'- phosphorothioate
  modified_base 17: mod_base = OTHER; note = 2'-O-methylcytidine-3'- phosphorothioate
  modified_base 18: mod_base = OTHER; note = 2'-O-methyladenosine-3'- phosphorothioate
  modified_base 19: mod_base = OTHER; note = 2'-O-methyladenosine-3'- phosphorothioate
  modified_base 20: mod_base = OTHER; note = 2'-O-methylguanosine-3'-phosphate
  misc_feature 1..5: note = RNA
  misc_feature 6..15: note = DNA
  misc_feature 16..20: note = RNA
ggttcagggtcacctccaag

SEQ ID NO: 178 - DNA, 20 bp, synthetic construct
  source 1..20: mol_type = other DNA; note = Description of Artificial Sequence: Synthetic oligonucleotide; note = Description of Combined DNA/RNA Molecule: Synthetic oligonucleotide
  modified_base 1: mod_base = OTHER; note = 2'-O-methyladenosine-3'- phosphorothioate
  modified_base 2: mod_base = OTHER; note = 2'-O-methylguanosine-3'- phosphorothioate
  modified_base 3: mod_base = OTHER; note = 2'-O-methylguanosine-3'- phosphorothioate
  modified_base 4: mod_base = OTHER; note = 2'-O-methyladenosine-3'- phosphorothioate
  modified_base 5: mod_base = OTHER; note = 2'-O-methyladenosine-3'- phosphorothioate
  modified_base 6: mod_base = OTHER; note = 2'-deoxythymidine-3'-phosphorothioate
  modified_base 7: mod_base = OTHER; note = 2'-deoxyguanosine-3'-phosphorothioate
  modified_base 8: mod_base = OTHER; note = 2'-deoxyguanosine-3'-phosphorothioate
  modified_base 9: mod_base = OTHER; note = 2'-deoxyguanosine-3'-phosphorothioate
  modified_base 10: mod_base = OTHER; note = 5'-methyl-deoxycytidine-3'-phosphorothioate
  modified_base 11: mod_base = OTHER; note = 2'-deoxyguanosine-3'-phosphorothioate
  modified_base 12: mod_base = OTHER; note = 2'-deoxyguanosine-3'-phosphorothioate
  modified_base 13: mod_base = OTHER; note = 2'-deoxythymidine-3'-phosphorothioate
  modified_base 14: mod_base = OTHER; note = 2'-deoxythymidine-3'-phosphorothioate
  modified_base 15: mod_base = OTHER; note = 5'-methyl-deoxycytidine-3'-phosphorothioate
  modified_base 16: mod_base = OTHER; note = 2'-O-methyladenosine-3'- phosphorothioate
  modified_base 17: mod_base = OTHER; note = 2'-O-methylguanosine-3'- phosphorothioate
  modified_base 18: mod_base = OTHER; note = 2'-O-methylguanosine-3'- phosphorothioate
  modified_base 19: mod_base = OTHER; note = 2'-O-methylguanosine-3'- phosphorothioate
  modified_base 20: mod_base = OTHER; note = 2'-O-methyluridine-3'-phosphate
  misc_feature 1..5: note = RNA
  misc_feature 6..15: note = DNA
  misc_feature 16..20: note = RNA
aggaatgggcggttcagggt

SEQ ID NO: 179 - DNA, 20 bp, synthetic construct
  source 1..20: mol_type = other DNA; note = Description of Artificial Sequence: Synthetic oligonucleotide; note = Description of Combined DNA/RNA Molecule: Synthetic oligonucleotide
  modified_base 1: mod_base = OTHER; note = 2'-O-methylcytidine-3'- phosphorothioate
  modified_base 2: mod_base = OTHER; note = 2'-O-methyladenosine-3'- phosphorothioate
  modified_base 3: mod_base = OTHER; note = 2'-O-methylcytidine-3'- phosphorothioate
  modified_base 4: mod_base = OTHER; note = 2'-O-methyladenosine-3'- phosphorothioate
  modified_base 5: mod_base = OTHER; note = 2'-O-methylguanosine-3'- phosphorothioate
  modified_base 6: mod_base = OTHER; note = 5'-methyl-deoxycytidine-3'-phosphorothioate
  modified_base 7: mod_base = OTHER; note = 2'-deoxyadenosine-3'-phosphorothioate
  modified_base 8: mod_base = OTHER; note = 2'-deoxyadenosine-3'-phosphorothioate
  modified_base 9: mod_base = OTHER; note = 2'-deoxyadenosine-3'-phosphorothioate
  modified_base 10: mod_base = OTHER; note = 5'-methyl-deoxycytidine-3'-phosphorothioate
  modified_base 11: mod_base = OTHER; note = 2'-deoxyadenosine-3'-phosphorothioate
  modified_base 12: mod_base = OTHER; note = 2'-deoxyguanosine-3'-phosphorothioate
  modified_base 13: mod_base = OTHER; note = 2'-deoxyguanosine-3'-phosphorothioate
  modified_base 14: mod_base = OTHER; note = 2'-deoxyadenosine-3'-phosphorothioate
  modified_base 15: mod_base = OTHER; note = 2'-deoxyadenosine-3'-phosphorothioate
  modified_base 16: mod_base = OTHER; note = 2'-O-methyluridine-3'-phosphorothioate
  modified_base 17: mod_base = OTHER; note = 2'-O-methylguanosine-3'- phosphorothioate
  modified_base 18: mod_base = OTHER; note = 2'-O-methylguanosine-3'- phosphorothioate
  modified_base 19: mod_base = OTHER; note = 2'-O-methylguanosine-3'- phosphorothioate
  modified_base 20: mod_base = OTHER; note = 2'-O-methylcytidine-3'-phosphate
  misc_feature 1..5: note = RNA
  misc_feature 6..15: note = DNA
  misc_feature 16..20: note = RNA
cacagcaaacaggaatgggc

SEQ ID NO: 180 - DNA, 20 bp, synthetic construct
  source 1..20: mol_type = other DNA; note = Description of Artificial Sequence: Synthetic oligonucleotide; note = Description of Combined DNA/RNA Molecule: Synthetic oligonucleotide
  modified_base 1: mod_base = OTHER; note = 2'-O-methylguanosine-3'- phosphorothioate
  modified_base 2: mod_base = OTHER; note = 2'-O-methylcytidine-3'- phosphorothioate
  modified_base 3: mod_base = OTHER; note = 2'-O-methyluridine-3'-phosphorothioate
  modified_base 4: mod_base = OTHER; note = 2'-O-methyluridine-3'-phosphorothioate
  modified_base 5: mod_base = OTHER; note = 2'-O-methyluridine-3'-phosphorothioate
  modified_base 6: mod_base = OTHER; note = 2'-deoxyguanosine-3'-phosphorothioate
  modified_base 7: mod_base = OTHER; note = 2'-deoxyadenosine-3'-phosphorothioate
  modified_base 8: mod_base = OTHER; note = 2'-deoxythymidine-3'-phosphorothioate
  modified_base 9: mod_base = OTHER; note = 5'-methyl-deoxycytidine-3'-phosphorothioate
  modified_base 10: mod_base = OTHER; note = 2'-deoxyadenosine-3'-phosphorothioate
  modified_base 11: mod_base = OTHER; note = 2'-deoxythymidine-3'-phosphorothioate
  modified_base 12: mod_base = OTHER; note = 2'-deoxyadenosine-3'-phosphorothioate
  modified_base 13: mod_base = OTHER; note = 5'-methyl-deoxycytidine-3'-phosphorothioate
  modified_base 14: mod_base = OTHER; note = 2'-deoxyadenosine-3'-phosphorothioate
  modified_base 15: mod_base = OTHER; note = 5'-methyl-deoxycytidine-3'-phosphorothioate
  modified_base 16: mod_base = OTHER; note = 2'-O-methyladenosine-3'- phosphorothioate
  modified_base 17: mod_base = OTHER; note = 2'-O-methylguanosine-3'- phosphorothioate
  modified_base 18: mod_base = OTHER; note = 2'-O-methylcytidine-3'- phosphorothioate
  modified_base 19: mod_base = OTHER; note = 2'-O-methyladenosine-3'- phosphorothioate
  modified_base 20: mod_base = OTHER; note = 2'-O-methyladenosine-3'-phosphate
  misc_feature 1..5: note = RNA
  misc_feature 6..15: note = DNA
  misc_feature 16..20: note = RNA
gctttgatcatacacagcaa

SEQ ID NO: 181 - DNA, 20 bp, synthetic construct
  source 1..20: mol_type = other DNA; note = Description of Artificial Sequence: Synthetic oligonucleotide; note = Description of Combined DNA/RNA Molecule: Synthetic oligonucleotide
  modified_base 1: mod_base = OTHER; note = 2'-O-methylguanosine-3'- phosphorothioate
  modified_base 2: mod_base = OTHER; note = 2'-O-methylguanosine-3'- phosphorothioate
  modified_base 3: mod_base = OTHER; note = 2'-O-methylguanosine-3'- phosphorothioate
  modified_base 4: mod_base = OTHER; note = 2'-O-methylcytidine-3'- phosphorothioate
  modified_base 5: mod_base = OTHER; note = 2'-O-methyladenosine-3'- phosphorothioate
  modified_base 6: mod_base = OTHER; note = 2'-deoxyguanosine-3'-phosphorothioate
  modified_base 7: mod_base = OTHER; note = 2'-deoxythymidine-3'-phosphorothioate
  modified_base 8: mod_base = OTHER; note = 2'-deoxyguanosine-3'-phosphorothioate
  modified_base 9: mod_base = OTHER; note = 2'-deoxyguanosine-3'-phosphorothioate
  modified_base 10: mod_base = OTHER; note = 5'-methyl-deoxycytidine-3'-phosphorothioate
  modified_base 11: mod_base = OTHER; note = 2'-deoxyguanosine-3'-phosphorothioate
  modified_base 12: mod_base = OTHER; note = 5'-methyl-deoxycytidine-3'-phosphorothioate
  modified_base 13: mod_base = OTHER; note = 2'-deoxythymidine-3'-phosphorothioate
  modified_base 14: mod_base = OTHER; note = 2'-deoxythymidine-3'-phosphorothioate
  modified_base 15: mod_base = OTHER; note = 2'-deoxythymidine-3'-phosphorothioate
  modified_base 16: mod_base = OTHER; note = 2'-O-methylguanosine-3'- phosphorothioate
  modified_base 17: mod_base = OTHER; note = 2'-O-methyladenosine-3'- phosphorothioate
  modified_base 18: mod_base = OTHER; note = 2'-O-methyluridine-3'-phosphorothioate
  modified_base 19: mod_base = OTHER; note = 2'-O-methylcytidine-3'- phosphorothioate
  modified_base 20: mod_base = OTHER; note = 2'-O-methyladenosine-3'-phosphate
  misc_feature 1..5: note = RNA
  misc_feature 6..15: note = DNA
  misc_feature 16..20: note = RNA
gggcagtggcgctttgatca

SEQ ID NO: 182 - DNA, 20 bp, synthetic construct
  source 1..20: mol_type = other DNA; note = Description of Artificial Sequence: Synthetic oligonucleotide; note = Description of Combined DNA/RNA Molecule: Synthetic oligonucleotide
  modified_base 1: mod_base = OTHER; note = 2'-O-methylcytidine-3'- phosphorothioate
  modified_base 2: mod_base = OTHER; note = 2'-O-methylcytidine-3'- phosphorothioate
  modified_base 3: mod_base = OTHER; note = 2'-O-methyladenosine-3'- phosphorothioate
  modified_base 4: mod_base = OTHER; note = 2'-O-methylguanosine-3'- phosphorothioate
  modified_base 5: mod_base = OTHER; note = 2'-O-methylguanosine-3'- phosphorothioate
  modified_base 6: mod_base = OTHER; note = 2'-deoxyadenosine-3'-phosphorothioate
  modified_base 7: mod_base = OTHER; note = 2'-deoxyadenosine-3'-phosphorothioate
  modified_base 8: mod_base = OTHER; note = 2'-deoxyguanosine-3'-phosphorothioate
  modified_base 9: mod_base = OTHER; note = 2'-deoxythymidine-3'-phosphorothioate
  modified_base 10: mod_base = OTHER; note = 2'-deoxyguanosine-3'-phosphorothioate
  modified_base 11: mod_base = OTHER; note = 5'-methyl-deoxycytidine-3'-phosphorothioate
  modified_base 12: mod_base = OTHER; note = 2'-deoxyadenosine-3'-phosphorothioate
  modified_base 13: mod_base = OTHER; note = 2'-deoxyguanosine-3'-phosphorothioate
  modified_base 14: mod_base = OTHER; note = 2'-deoxyguanosine-3'-phosphorothioate
  modified_base 15: mod_base = OTHER; note = 2'-deoxyguanosine-3'-phosphorothioate
  modified_base 16: mod_base = OTHER; note = 2'-O-methylcytidine-3'- phosphorothioate
  modified_base 17: mod_base = OTHER; note = 2'-O-methyladenosine-3'- phosphorothioate
  modified_base 18: mod_base = OTHER; note = 2'-O-methylguanosine-3'- phosphorothioate
  modified_base 19: mod_base = OTHER; note = 2'-O-methyluridine-3'-phosphorothioate
  modified_base 20: mod_base = OTHER; note = 2'-O-methylguanosine-3'-phosphate
  misc_feature 1..5: note = RNA
  misc_feature 6..15: note = DNA
  misc_feature 16..20: note = RNA
ccaggaagtgcagggcagtg

SEQ ID NO: 183 - DNA, 20 bp, synthetic construct
  source 1..20: mol_type = other DNA; note = Description of Artificial Sequence: Synthetic oligonucleotide; note = Description of Combined DNA/RNA Molecule: Synthetic oligonucleotide
  modified_base 1: mod_base = OTHER; note = 2'-O-methylguanosine-3'- phosphorothioate
  modified_base 2: mod_base = OTHER; note = 2'-O-methylcytidine-3'- phosphorothioate
  modified_base 3: mod_base = OTHER; note = 2'-O-methylcytidine-3'- phosphorothioate
  modified_base 4: mod_base = OTHER; note = 2'-O-methyladenosine-3'- phosphorothioate
  modified_base 5: mod_base = OTHER; note = 2'-O-methylcytidine-3'- phosphorothioate
  modified_base 6: mod_base = OTHER; note = 2'-deoxyguanosine-3'-phosphorothioate
  modified_base 7: mod_base = OTHER; note = 5'-methyl-deoxycytidine-3'-phosphorothioate
  modified_base 8: mod_base = OTHER; note = 2'-deoxyguanosine-3'-phosphorothioate
  modified_base 9: mod_base = OTHER; note = 2'-deoxyguanosine-3'-phosphorothioate
  modified_base 10: mod_base = OTHER; note = 5'-methyl-deoxycytidine-3'-phosphorothioate
  modified_base 11: mod_base = OTHER; note = 5'-methyl-deoxycytidine-3'-phosphorothioate
  modified_base 12: mod_base = OTHER; note = 5'-methyl-deoxycytidine-3'-phosphorothioate
  modified_base 13: mod_base = OTHER; note = 2'-deoxyadenosine-3'-phosphorothioate
  modified_base 14: mod_base = OTHER; note = 2'-deoxyguanosine-3'-phosphorothioate
  modified_base 15: mod_base = OTHER; note = 2'-deoxyguanosine-3'-phosphorothioate
  modified_base 16: mod_base = OTHER; note = 2'-O-methyladenosine-3'- phosphorothioate
  modified_base 17: mod_base = OTHER; note = 2'-O-methyladenosine-3'- phosphorothioate
  modified_base 18: mod_base = OTHER; note = 2'-O-methylguanosine-3'- phosphorothioate
  modified_base 19: mod_base = OTHER; note = 2'-O-methyluridine-3'-phosphorothioate
  modified_base 20: mod_base = OTHER; note = 2'-O-methylguanosine-3'-phosphate
  misc_feature 1..5: note = RNA
  misc_feature 6..15: note = DNA
  misc_feature 16..20: note = RNA
gccacgcggcccaggaagtg

SEQ ID NO: 184 - DNA, 20 bp, synthetic construct
  source 1..20: mol_type = other DNA; note = Description of Artificial Sequence: Synthetic oligonucleotide; note = Description of Combined DNA/RNA Molecule: Synthetic oligonucleotide
  modified_base 1: mod_base = OTHER; note = 2'-O-methylcytidine-3'- phosphorothioate
  modified_base 2: mod_base = OTHER; note = 2'-O-methyluridine-3'-phosphorothioate
  modified_base 3: mod_base = OTHER; note = 2'-O-methylcytidine-3'- phosphorothioate
  modified_base 4: mod_base = OTHER; note = 2'-O-methyladenosine-3'- phosphorothioate
  modified_base 5: mod_base = OTHER; note = 2'-O-methylguanosine-3'- phosphorothioate
  modified_base 6: mod_base = OTHER; note = 5'-methyl-deoxycytidine-3'-phosphorothioate
  modified_base 7: mod_base = OTHER; note = 2'-deoxyguanosine-3'-phosphorothioate
  modified_base 8: mod_base = OTHER; note = 2'-deoxyguanosine-3'-phosphorothioate
  modified_base 9: mod_base = OTHER; note = 2'-deoxyguanosine-3'-phosphorothioate
  modified_base 10: mod_base = OTHER; note = 2'-deoxythymidine-3'-phosphorothioate
  modified_base 11: mod_base = OTHER; note = 2'-deoxythymidine-3'-phosphorothioate
  modified_base 12: mod_base = OTHER; note = 2'-deoxyguanosine-3'-phosphorothioate
  modified_base 13: mod_base = OTHER; note = 2'-deoxyguanosine-3'-phosphorothioate
  modified_base 14: mod_base = OTHER; note = 5'-methyl-deoxycytidine-3'-phosphorothioate
  modified_base 15: mod_base = OTHER; note = 5'-methyl-deoxycytidine-3'-phosphorothioate
  modified_base 16: mod_base = OTHER; note = 2'-O-methyladenosine-3'- phosphorothioate
  modified_base 17: mod_base = OTHER; note = 2'-O-methylcytidine-3'- phosphorothioate
  modified_base 18: mod_base = OTHER; note = 2'-O-methylguanosine-3'- phosphorothioate
  modified_base 19: mod_base = OTHER; note = 2'-O-methylcytidine-3'- phosphorothioate
  modified_base 20: mod_base = OTHER; note = 2'-O-methylguanosine-3'-phosphate
  misc_feature 1..5: note = RNA
  misc_feature 6..15: note = DNA
  misc_feature 16..20: note = RNA
ctcagcgggttggccacgcg

SEQ ID NO: 185 - DNA, 20 bp, synthetic construct
  source 1..20: mol_type = other DNA; note = Description of Artificial Sequence: Synthetic oligonucleotide; note = Description of Combined DNA/RNA Molecule: Synthetic oligonucleotide
  modified_base 1: mod_base = OTHER; note = 2'-O-methyluridine-3'-phosphorothioate
  modified_base 2: mod_base = OTHER; note = 2'-O-methylcytidine-3'- phosphorothioate
  modified_base 3: mod_base = OTHER; note = 2'-O-methyladenosine-3'- phosphorothioate
  modified_base 4: mod_base = OTHER; note = 2'-O-methyluridine-3'-phosphorothioate
  modified_base 5: mod_base = OTHER; note = 2'-O-methylguanosine-3'- phosphorothioate
  modified_base 6: mod_base = OTHER; note = 5'-methyl-deoxycytidine-3'-phosphorothioate
  modified_base 7: mod_base = OTHER; note = 2'-deoxythymidine-3'-phosphorothioate
  modified_base 8: mod_base = OTHER; note = 2'-deoxyguanosine-3'-phosphorothioate
  modified_base 9: mod_base = OTHER; note = 2'-deoxythymidine-3'-phosphorothioate
  modified_base 10: mod_base = OTHER; note = 2'-deoxyguanosine-3'-phosphorothioate
  modified_base 11: mod_base = OTHER; note = 5'-methyl-deoxycytidine-3'-phosphorothioate
  modified_base 12: mod_base = OTHER; note = 2'-deoxythymidine-3'-phosphorothioate
  modified_base 13: mod_base = OTHER; note = 5'-methyl-deoxycytidine-3'-phosphorothioate
  modified_base 14: mod_base = OTHER; note = 2'-deoxyadenosine-3'-phosphorothioate
  modified_base 15: mod_base = OTHER; note = 2'-deoxyguanosine-3'-phosphorothioate
  modified_base 16: mod_base = OTHER; note = 2'-O-methylcytidine-3'- phosphorothioate
  modified_base 17: mod_base = OTHER; note = 2'-O-methylguanosine-3'- phosphorothioate
  modified_base 18: mod_base = OTHER; note = 2'-O-methylguanosine-3'- phosphorothioate
  modified_base 19: mod_base = OTHER; note = 2'-O-methylguanosine-3'- phosphorothioate
  modified_base 20: mod_base = OTHER; note = 2'-O-methyluridine-3'-phosphate
  misc_feature 1..5: note = RNA
  misc_feature 6..15: note = DNA
  misc_feature 16..20: note = RNA
tcatgctgtgctcagcgggt

SEQ ID NO: 186 - DNA, 20 bp, synthetic construct
  source 1..20: mol_type = other DNA; note = Description of Artificial Sequence: Synthetic oligonucleotide; note = Description of Combined DNA/RNA Molecule: Synthetic oligonucleotide
  modified_base 1: mod_base = OTHER; note = 2'-O-methylguanosine-3'- phosphorothioate
  modified_base 2: mod_base = OTHER; note = 2'-O-methylguanosine-3'- phosphorothioate
  modified_base 3: mod_base = OTHER; note = 2'-O-methylguanosine-3'- phosphorothioate
  modified_base 4: mod_base = OTHER; note = 2'-O-methylcytidine-3'- phosphorothioate
  modified_base 5: mod_base = OTHER; note = 2'-O-methylcytidine-3'- phosphorothioate
  modified_base 6: mod_base = OTHER; note = 5'-methyl-deoxycytidine-3'-phosphorothioate
  modified_base 7: mod_base = OTHER; note = 2'-deoxythymidine-3'-phosphorothioate
  modified_base 8: mod_base = OTHER; note = 2'-deoxyguanosine-3'-phosphorothioate
  modified_base 9: mod_base = OTHER; note = 2'-deoxyguanosine-3'-phosphorothioate
  modified_base 10: mod_base = OTHER; note = 5'-methyl-deoxycytidine-3'-phosphorothioate
  modified_base 11: mod_base = OTHER; note = 5'-methyl-deoxycytidine-3'-phosphorothioate
  modified_base 12: mod_base = OTHER; note = 2'-deoxythymidine-3'-phosphorothioate
  modified_base 13: mod_base = OTHER; note = 5'-methyl-deoxycytidine-3'-phosphorothioate
  modified_base 14: mod_base = OTHER; note = 2'-deoxyadenosine-3'-phosphorothioate
  modified_base 15: mod_base = OTHER; note = 2'-deoxythymidine-3'-phosphorothioate
  modified_base 16: mod_base = OTHER; note = 2'-O-methylguanosine-3'- phosphorothioate
  modified_base 17: mod_base = OTHER; note = 2'-O-methylcytidine-3'- phosphorothioate
  modified_base 18: mod_base = OTHER; note = 2'-O-methyluridine-3'-phosphorothioate
  modified_base 19: mod_base = OTHER; note = 2'-O-methylguanosine-3'- phosphorothioate
  modified_base 20: mod_base = OTHER; note = 2'-O-methyluridine-3'-phosphate
  misc_feature 1..5: note = RNA
  misc_feature 6..15: note = DNA
  misc_feature 16..20: note = RNA
gggccctggcctcatgctgt

SEQ ID NO: 187 - DNA, 20 bp, synthetic construct
  source 1..20: mol_type = other DNA; note = Description of Artificial Sequence: Synthetic oligonucleotide; note = Description of Combined DNA/RNA Molecule: Synthetic oligonucleotide
  modified_base 1: mod_base = OTHER; note = 2'-O-methylcytidine-3'- phosphorothioate
  modified_base 2: mod_base = OTHER; note = 2'-O-methyladenosine-3'- phosphorothioate
  modified_base 3: mod_base = OTHER; note = 2'-O-methylcytidine-3'- phosphorothioate
  modified_base 4: mod_base = OTHER; note = 2'-O-methyluridine-3'-phosphorothioate
  modified_base 5: mod_base = OTHER; note = 2'-O-methylguanosine-3'- phosphorothioate
  modified_base 6: mod_base = OTHER; note = 2'-deoxythymidine-3'-phosphorothioate
  modified_base 7: mod_base = OTHER; note = 2'-deoxyguanosine-3'-phosphorothioate
  modified_base 8: mod_base = OTHER; note = 2'-deoxythymidine-3'-phosphorothioate
  modified_base 9: mod_base = OTHER; note = 2'-deoxythymidine-3'-phosphorothioate
  modified_base 10: mod_base = OTHER; note = 5'-methyl-deoxycytidine-3'-phosphorothioate
  modified_base 11: mod_base = OTHER; note = 2'-deoxythymidine-3'-phosphorothioate
  modified_base 12: mod_base = OTHER; note = 2'-deoxyguanosine-3'-phosphorothioate
  modified_base 13: mod_base = OTHER; note = 2'-deoxyguanosine-3'-phosphorothioate
  modified_base 14: mod_base = OTHER; note = 2'-deoxyguanosine-3'-phosphorothioate
  modified_base 15: mod_base = OTHER; note = 2'-deoxyguanosine-3'-phosphorothioate
  modified_base 16: mod_base = OTHER; note = 2'-O-methylcytidine-3'- phosphorothioate
  modified_base 17: mod_base = OTHER; note = 2'-O-methylcytidine-3'- phosphorothioate
  modified_base 18: mod_base = OTHER; note = 2'-O-methylcytidine-3'- phosphorothioate
  modified_base 19: mod_base = OTHER; note = 2'-O-methyluridine-3'-phosphorothioate
  modified_base 20: mod_base = OTHER; note = 2'-O-methylguanosine-3'-phosphate
  misc_feature 1..5: note = RNA
  misc_feature 6..15: note = DNA
  misc_feature 16..20: note = RNA
cactgtgttctggggccctg

SEQ ID NO: 188 - DNA, 20 bp, synthetic construct
  source 1..20: mol_type = other DNA; note = Description of Artificial Sequence: Synthetic oligonucleotide; note = Description of Combined DNA/RNA Molecule: Synthetic oligonucleotide
  modified_base 1: mod_base = OTHER; note = 2'-O-methylguanosine-3'- phosphorothioate
  modified_base 2: mod_base = OTHER; note = 2'-O-methylcytidine-3'- phosphorothioate
  modified_base 3: mod_base = OTHER; note = 2'-O-methylcytidine-3'- phosphorothioate
  modified_base 4: mod_base = OTHER; note = 2'-O-methyluridine-3'-phosphorothioate
  modified_base 5: mod_base = OTHER; note = 2'-O-methyluridine-3'-phosphorothioate
  modified_base 6: mod_base = OTHER; note = 2'-deoxyguanosine-3'-phosphorothioate
  modified_base 7: mod_base = OTHER; note = 5'-methyl-deoxycytidine-3'-phosphorothioate
  modified_base 8: mod_base = OTHER; note = 5'-methyl-deoxycytidine-3'-phosphorothioate
  modified_base 9: mod_base = OTHER; note = 2'-deoxyadenosine-3'-phosphorothioate
  modified_base 10: mod_base = OTHER; note = 2'-deoxyguanosine-3'-phosphorothioate
  modified_base 11: mod_base = OTHER; note = 2'-deoxyguanosine-3'-phosphorothioate
  modified_base 12: mod_base = OTHER; note = 5'-methyl-deoxycytidine-3'-phosphorothioate
  modified_base 13: mod_base = OTHER; note = 2'-deoxyadenosine-3'-phosphorothioate
  modified_base 14: mod_base = OTHER; note = 5'-methyl-deoxycytidine-3'-phosphorothioate
  modified_base 15: mod_base = OTHER; note = 2'-deoxythymidine-3'-phosphorothioate
  modified_base 16: mod_base = OTHER; note = 2'-O-methylguanosine-3'- phosphorothioate
  modified_base 17: mod_base = OTHER; note = 2'-O-methyluridine-3'-phosphorothioate
  modified_base 18: mod_base = OTHER; note = 2'-O-methylguanosine-3'- phosphorothioate
  modified_base 19: mod_base = OTHER; note = 2'-O-methyluridine-3'-phosphorothioate
  modified_base 20: mod_base = OTHER; note = 2'-O-methyluridine-3'-phosphate
  misc_feature 1..5: note = RNA
  misc_feature 6..15: note = DNA
  misc_feature 16..20: note = RNA
gccttgccaggcactgtgtt

SEQ ID NO: 189 - DNA, 20 bp, synthetic construct
  source 1..20: mol_type = other DNA; note = Description of Artificial Sequence: Synthetic oligonucleotide; note = Description of Combined DNA/RNA Molecule: Synthetic oligonucleotide
  modified_base 1: mod_base = OTHER; note = 2'-O-methylcytidine-3'- phosphorothioate
  modified_base 2: mod_base = OTHER; note = 2'-O-methyladenosine-3'- phosphorothioate
  modified_base 3: mod_base = OTHER; note = 2'-O-methylguanosine-3'- phosphorothioate
  modified_base 4: mod_base = OTHER; note = 2'-O-methylguanosine-3'- phosphorothioate
  modified_base 5: mod_base = OTHER; note = 2'-O-methylguanosine-3'- phosphorothioate
  modified_base 6: mod_base = OTHER; note = 2'-deoxyguanosine-3'-phosphorothioate
  modified_base 7: mod_base = OTHER; note = 5'-methyl-deoxycytidine-3'-phosphorothioate
  modified_base 8: mod_base = OTHER; note = 2'-deoxyadenosine-3'-phosphorothioate
  modified_base 9: mod_base = OTHER; note = 2'-deoxyguanosine-3'-phosphorothioate
  modified_base 10: mod_base = OTHER; note = 2'-deoxyadenosine-3'-phosphorothioate
  modified_base 11: mod_base = OTHER; note = 2'-deoxyguanosine-3'-phosphorothioate
  modified_base 12: mod_base = OTHER; note = 2'-deoxyguanosine-3'-phosphorothioate
  modified_base 13: mod_base = OTHER; note = 5'-methyl-deoxycytidine-3'-phosphorothioate
  modified_base 14: mod_base = OTHER; note = 5'-methyl-deoxycytidine-3'-phosphorothioate
  modified_base 15: mod_base = OTHER; note = 2'-deoxythymidine-3'-phosphorothioate
  modified_base 16: mod_base = OTHER; note = 2'-O-methyluridine-3'-phosphorothioate
  modified_base 17: mod_base = OTHER; note = 2'-O-methylguanosine-3'- phosphorothioate
  modified_base 18: mod_base = OTHER; note = 2'-O-methylcytidine-3'- phosphorothioate
  modified_base 19: mod_base = OTHER; note = 2'-O-methylcytidine-3'- phosphorothioate
  modified_base 20: mod_base = OTHER; note = 2'-O-methyladenosine-3'-phosphate
  misc_feature 1..5: note = RNA
  misc_feature 6..15: note = DNA
  misc_feature 16..20: note = RNA
caggggcagaggccttgcca

SEQ ID NO: 190 - DNA, 20 bp, synthetic construct
  source 1..20: mol_type = other DNA; note = Description of Artificial Sequence: Synthetic oligonucleotide; note = Description of Combined DNA/RNA Molecule: Synthetic oligonucleotide
  modified_base 1: mod_base = OTHER; note = 2'-O-methylcytidine-3'- phosphorothioate
  modified_base 2: mod_base = OTHER; note = 2'-O-methylcytidine-3'- phosphorothioate
  modified_base 3: mod_base = OTHER; note = 2'-O-methyluridine-3'-phosphorothioate
  modified_base 4: mod_base = OTHER; note = 2'-O-methylcytidine-3'- phosphorothioate
  modified_base 5: mod_base = OTHER; note = 2'-O-methyladenosine-3'- phosphorothioate
  modified_base 6: mod_base = OTHER; note = 2'-deoxyadenosine-3'-phosphorothioate
  modified_base 7: mod_base = OTHER; note = 2'-deoxyadenosine-3'-phosphorothioate
  modified_base 8: mod_base = OTHER; note = 2'-deoxyguanosine-3'-phosphorothioate
  modified_base 9: mod_base = OTHER; note = 2'-deoxyguanosine-3'-phosphorothioate
  modified_base 10: mod_base = OTHER; note = 5'-methyl-deoxycytidine-3'-phosphorothioate
  modified_base 11: mod_base = OTHER; note = 5'-methyl-deoxycytidine-3'-phosphorothioate
  modified_base 12: mod_base = OTHER; note = 2'-deoxyadenosine-3'-phosphorothioate
  modified_base 13: mod_base = OTHER; note = 2'-deoxyguanosine-3'-phosphorothioate
  modified_base 14: mod_base = OTHER; note = 2'-deoxyguanosine-3'-phosphorothioate
  modified_base 15: mod_base = OTHER; note = 2'-deoxyguanosine-3'-phosphorothioate
  modified_base 16: mod_base = OTHER; note = 2'-O-methylguanosine-3'- phosphorothioate
  modified_base 17: mod_base = OTHER; note = 2'-O-methylcytidine-3'- phosphorothioate
  modified_base 18: mod_base = OTHER; note = 2'-O-methyladenosine-3'- phosphorothioate
  modified_base 19: mod_base = OTHER; note = 2'-O-methylguanosine-3'- phosphorothioate
  modified_base 20: mod_base = OTHER; note = 2'-O-methyladenosine-3'-phosphate
  misc_feature 1..5: note = RNA
  misc_feature 6..15: note = DNA
  misc_feature 16..20: note = RNA
cctcaaaggccaggggcaga

SEQ ID NO: 191 - DNA, 20 bp, synthetic construct
  source 1..20: mol_type = other DNA; note = Description of Artificial Sequence: Synthetic oligonucleotide; note = Description of Combined DNA/RNA Molecule: Synthetic oligonucleotide
  modified_base 1: mod_base = OTHER; note = 2'-O-methylcytidine-3'- phosphorothioate
  modified_base 2: mod_base = OTHER; note = 2'-O-methyluridine-3'-phosphorothioate
  modified_base 3: mod_base = OTHER; note = 2'-O-methylguanosine-3'- phosphorothioate
  modified_base 4: mod_base = OTHER; note = 2'-O-methylcytidine-3'- phosphorothioate
  modified_base 5: mod_base = OTHER; note = 2'-O-methyluridine-3'-phosphorothioate
  modified_base 6: mod_base = OTHER; note = 2'-deoxyguanosine-3'-phosphorothioate
  modified_base 7: mod_base = OTHER; note = 2'-deoxyguanosine-3'-phosphorothioate
  modified_base 8: mod_base = OTHER; note = 5'-methyl-deoxycytidine-3'-phosphorothioate
  modified_base 9: mod_base = OTHER; note = 5'-methyl-deoxycytidine-3'-phosphorothioate
  modified_base 10: mod_base = OTHER; note = 2'-deoxythymidine-3'-phosphorothioate
  modified_base 11: mod_base = OTHER; note = 2'-deoxythymidine-3'-phosphorothioate
  modified_base 12: mod_base = OTHER; note = 2'-deoxythymidine-3'-phosphorothioate
  modified_base 13: mod_base = OTHER; note = 2'-deoxyguanosine-3'-phosphorothioate
  modified_base 14: mod_base = OTHER; note = 5'-methyl-deoxycytidine-3'-phosphorothioate
  modified_base 15: mod_base = OTHER; note = 5'-methyl-deoxycytidine-3'-phosphorothioate
  modified_base 16: mod_base = OTHER; note = 2'-O-methyluridine-3'-phosphorothioate
  modified_base 17: mod_base = OTHER; note = 2'-O-methylcytidine-3'- phosphorothioate
  modified_base 18: mod_base = OTHER; note = 2'-O-methyladenosine-3'- phosphorothioate
  modified_base 19: mod_base = OTHER; note = 2'-O-methyladenosine-3'- phosphorothioate
  modified_base 20: mod_base = OTHER; note = 2'-O-methyladenosine-3'-phosphate
  misc_feature 1..5: note = RNA
  misc_feature 6..15: note = DNA
  misc_feature 16..20: note = RNA
ctgctggcctttgcctcaaa

SEQ ID NO: 192 - DNA, 20 bp, synthetic construct
  source 1..20: mol_type = other DNA; note = Description of Artificial Sequence: Synthetic oligonucleotide; note = Description of Combined DNA/RNA Molecule: Synthetic oligonucleotide
  modified_base 1: mod_base = OTHER; note = 2'-O-methyluridine-3'-phosphorothioate
  modified_base 2: mod_base = OTHER; note = 2'-O-methyluridine-3'-phosphorothioate
  modified_base 3: mod_base = OTHER; note = 2'-O-methylguanosine-3'- phosphorothioate
  modified_base 4: mod_base = OTHER; note = 2'-O-methyluridine-3'-phosphorothioate
  modified_base 5: mod_base = OTHER; note = 2'-O-methyluridine-3'-phosphorothioate
  modified_base 6: mod_base = OTHER; note = 2'-deoxyadenosine-3'-phosphorothioate
  modified_base 7: mod_base = OTHER; note = 2'-deoxythymidine-3'-phosphorothioate
  modified_base 8: mod_base = OTHER; note = 5'-methyl-deoxycytidine-3'-phosphorothioate
  modified_base 9: mod_base = OTHER; note = 2'-deoxythymidine-3'-phosphorothioate
  modified_base 10: mod_base = OTHER; note = 2'-deoxyguanosine-3'-phosphorothioate
  modified_base 11: mod_base = OTHER; note = 5'-methyl-deoxycytidine-3'-phosphorothioate
  modified_base 12: mod_base = OTHER; note = 2'-deoxythymidine-3'-phosphorothioate
  modified_base 13: mod_base = OTHER; note = 2'-deoxyguanosine-3'-phosphorothioate
  modified_base 14: mod_base = OTHER; note = 5'-methyl-deoxycytidine-3'-phosphorothioate
  modified_base 15: mod_base = OTHER; note = 2'-deoxythymidine-3'-phosphorothioate
  modified_base 16: mod_base = OTHER; note = 2'-O-methylguanosine-3'- phosphorothioate
  modified_base 17: mod_base = OTHER; note = 2'-O-methylguanosine-3'- phosphorothioate
  modified_base 18: mod_base = OTHER; note = 2'-O-methylcytidine-3'- phosphorothioate
  modified_base 19: mod_base = OTHER; note = 2'-O-methylcytidine-3'- phosphorothioate
  modified_base 20: mod_base = OTHER; note = 2'-O-methyluridine-3'-phosphate
  misc_feature 1..5: note = RNA
  misc_feature 6..15: note = DNA
  misc_feature 16..20: note = RNA
ttgttatctgctgctggcct

SEQ ID NO: 193 - DNA, 20 bp, synthetic construct
  source 1..20: mol_type = other DNA; note = Description of Artificial Sequence: Synthetic oligonucleotide; note = Description of Combined DNA/RNA Molecule: Synthetic oligonucleotide
  modified_base 1: mod_base = OTHER; note = 2'-O-methyluridine-3'-phosphorothioate
  modified_base 2: mod_base = OTHER; note = 2'-O-methyluridine-3'-phosphorothioate
  modified_base 3: mod_base = OTHER; note = 2'-O-methyluridine-3'-phosphorothioate
  modified_base 4: mod_base = OTHER; note = 2'-O-methylguanosine-3'- phosphorothioate
  modified_base 5: mod_base = OTHER; note = 2'-O-methyluridine-3'-phosphorothioate
  modified_base 6: mod_base = OTHER; note = 5'-methyl-deoxycytidine-3'-phosphorothioate
  modified_base 7: mod_base = OTHER; note = 5'-methyl-deoxycytidine-3'-phosphorothioate
  modified_base 8: mod_base = OTHER; note = 2'-deoxyguanosine-3'-phosphorothioate
  modified_base 9: mod_base = OTHER; note = 2'-deoxyguanosine-3'-phosphorothioate
  modified_base 10: mod_base = OTHER; note = 2'-deoxyguanosine-3'-phosphorothioate
  modified_base 11: mod_base = OTHER; note = 2'-deoxyguanosine-3'-phosphorothioate
  modified_base 12: mod_base = OTHER; note = 2'-deoxythymidine-3'-phosphorothioate
  modified_base 13: mod_base = OTHER; note = 2'-deoxythymidine-3'-phosphorothioate
  modified_base 14: mod_base = OTHER; note = 2'-deoxyguanosine-3'-phosphorothioate
  modified_base 15: mod_base = OTHER; note = 2'-deoxythymidine-3'-phosphorothioate
  modified_base 16: mod_base = OTHER; note = 2'-O-methyluridine-3'-phosphorothioate
  modified_base 17: mod_base = OTHER; note = 2'-O-methyladenosine-3'- phosphorothioate
  modified_base 18: mod_base = OTHER; note = 2'-O-methyluridine-3'-phosphorothioate
  modified_base 19: mod_base = OTHER; note = 2'-O-methylcytidine-3'- phosphorothioate
  modified_base 20: mod_base = OTHER; note = 2'-O-methyluridine-3'-phosphate
  misc_feature 1..5: note = RNA
  misc_feature 6..15: note = DNA
  misc_feature 16..20: note = RNA
tttgtccggggttgttatct

SEQ ID NO: 194 - DNA, 20 bp, synthetic construct
  source 1..20: mol_type = other DNA; note = Description of Artificial Sequence: Synthetic oligonucleotide; note = Description of Combined DNA/RNA Molecule: Synthetic oligonucleotide
  modified_base 1: mod_base = OTHER; note = 2'-O-methylcytidine-3'- phosphorothioate
  modified_base 2: mod_base = OTHER; note = 2'-O-methyladenosine-3'- phosphorothioate
  modified_base 3: mod_base = OTHER; note = 2'-O-methylcytidine-3'- phosphorothioate
  modified_base 4: mod_base = OTHER; note = 2'-O-methyladenosine-3'- phosphorothioate
  modified_base 5: mod_base = OTHER; note = 2'-O-methyluridine-3'-phosphorothioate
  modified_base 6: mod_base = OTHER; note = 5'-methyl-deoxycytidine-3'-phosphorothioate
  modified_base 7: mod_base = OTHER; note = 2'-deoxyguanosine-3'-phosphorothioate
  modified_base 8: mod_base = OTHER; note = 5'-methyl-deoxycytidine-3'-phosphorothioate
  modified_base 9: mod_base = OTHER; note = 2'-deoxythymidine-3'-phosphorothioate
  modified_base 10: mod_base = OTHER; note = 2'-deoxyguanosine-3'-phosphorothioate
  modified_base 11: mod_base = OTHER; note = 2'-deoxyadenosine-3'-phosphorothioate
  modified_base 12: mod_base = OTHER; note = 2'-deoxythymidine-3'-phosphorothioate
  modified_base 13: mod_base = OTHER; note = 2'-deoxythymidine-3'-phosphorothioate
  modified_base 14: mod_base = OTHER; note = 2'-deoxythymidine-3'-phosphorothioate
  modified_base 15: mod_base = OTHER; note = 2'-deoxyguanosine-3'-phosphorothioate
  modified_base 16: mod_base = OTHER; note = 2'-O-methyluridine-3'-phosphorothioate
  modified_base 17: mod_base = OTHER; note = 2'-O-methylcytidine-3'- phosphorothioate
  modified_base 18: mod_base = OTHER; note = 2'-O-methylcytidine-3'- phosphorothioate
  modified_base 19: mod_base = OTHER; note = 2'-O-methylguanosine-3'- phosphorothioate
  modified_base 20: mod_base = OTHER; note = 2'-O-methylguanosine-3'-phosphate
  misc_feature 1..5: note = RNA
  misc_feature 6..15: note = DNA
  misc_feature 16..20: note = RNA
cacatcgctgatttgtccgg

SEQ ID NO: 195 - DNA, 20 bp, synthetic construct
  source 1..20: mol_type = other DNA; note = Description of Artificial Sequence: Synthetic oligonucleotide; note = Description of Combined DNA/RNA Molecule: Synthetic oligonucleotide
  modified_base 1: mod_base = OTHER; note = 2'-O-methyladenosine-3'- phosphorothioate
  modified_base 2: mod_base = OTHER; note = 2'-O-methylcytidine-3'- phosphorothioate
  modified_base 3: mod_base = OTHER; note = 2'-O-methyluridine-3'-phosphorothioate
  modified_base 4: mod_base = OTHER; note = 2'-O-methylguanosine-3'- phosphorothioate
  modified_base 5: mod_base = OTHER; note = 2'-O-methylguanosine-3'- phosphorothioate
  modified_base 6: mod_base = OTHER; note = 2'-deoxyguanosine-3'-phosphorothioate
  modified_base 7: mod_base = OTHER; note = 2'-deoxyguanosine-3'-phosphorothioate
  modified_base 8: mod_base = OTHER; note = 2'-deoxyguanosine-3'-phosphorothioate
  modified_base 9: mod_base = OTHER; note = 2'-deoxythymidine-3'-phosphorothioate
  modified_base 10: mod_base = OTHER; note = 2'-deoxyguanosine-3'-phosphorothioate
  modified_base 11: mod_base = OTHER; note = 2'-deoxyadenosine-3'-phosphorothioate
  modified_base 12: mod_base = OTHER; note = 5'-methyl-deoxycytidine-3'-phosphorothioate
  modified_base 13: mod_base = OTHER; note = 2'-deoxyadenosine-3'-phosphorothioate
  modified_base 14: mod_base = OTHER; note = 5'-methyl-deoxycytidine-3'-phosphorothioate
  modified_base 15: mod_base = OTHER; note = 2'-deoxyadenosine-3'-phosphorothioate
  modified_base 16: mod_base = OTHER; note = 2'-O-methyluridine-3'-phosphorothioate
  modified_base 17: mod_base = OTHER; note = 2'-O-methylcytidine-3'- phosphorothioate
  modified_base 18: mod_base = OTHER; note = 2'-O-methylguanosine-3'- phosphorothioate
  modified_base 19: mod_base = OTHER; note = 2'-O-methylcytidine-3'- phosphorothioate
  modified_base 20: mod_base = OTHER; note = 2'-O-methyluridine-3'-phosphate
  misc_feature 1..5: note = RNA
  misc_feature 6..15: note = DNA
  misc_feature 16..20: note = RNA
actgggggtgacacatcgct

SEQ ID NO: 196 - DNA, 20 bp, synthetic construct
  source 1..20: mol_type = other DNA; note = Description of Artificial Sequence: Synthetic oligonucleotide; note = Description of Combined DNA/RNA Molecule: Synthetic oligonucleotide
  modified_base 1: mod_base = OTHER; note = 2'-O-methyladenosine-3'- phosphorothioate
  modified_base 2: mod_base = OTHER; note = 2'-O-methyladenosine-3'- phosphorothioate
  modified_base 3: mod_base = OTHER; note = 2'-O-methyladenosine-3'- phosphorothioate
  modified_base 4: mod_base = OTHER; note = 2'-O-methylguanosine-3'- phosphorothioate
  modified_base 5: mod_base = OTHER; note = 2'-O-methylguanosine-3'- phosphorothioate
  modified_base 6: mod_base = OTHER; note = 2'-deoxythymidine-3'-phosphorothioate
  modified_base 7: mod_base = OTHER; note = 2'-deoxyguanosine-3'-phosphorothioate
  modified_base 8: mod_base = OTHER; note = 2'-deoxyguanosine-3'-phosphorothioate
  modified_base 9: mod_base = OTHER; note = 2'-deoxyguanosine-3'-phosphorothioate
  modified_base 10: mod_base = OTHER; note = 2'-deoxyadenosine-3'-phosphorothioate
  modified_base 11: mod_base = OTHER; note = 2'-deoxyguanosine-3'-phosphorothioate
  modified_base 12: mod_base = OTHER; note = 2'-deoxyadenosine-3'-phosphorothioate
  modified_base 13: mod_base = OTHER; note = 5'-methyl-deoxycytidine-3'-phosphorothioate
  modified_base 14: mod_base = OTHER; note = 2'-deoxythymidine-3'-phosphorothioate
  modified_base 15: mod_base = OTHER; note = 2'-deoxyguanosine-3'-phosphorothioate
  modified_base 16: mod_base = OTHER; note = 2'-O-methylguanosine-3'- phosphorothioate
  modified_base 17: mod_base = OTHER; note = 2'-O-methylguanosine-3'- phosphorothioate
  modified_base 18: mod_base = OTHER; note = 2'-O-methylguanosine-3'- phosphorothioate
  modified_base 19: mod_base = OTHER; note = 2'-O-methylguanosine-3'- phosphorothioate
  modified_base 20: mod_base = OTHER; note = 2'-O-methyluridine-3'-phosphate
  misc_feature 1..5: note = RNA
  misc_feature 6..15: note = DNA
  misc_feature 16..20: note = RNA
aaaggtgggagactgggggt

SEQ ID NO: 197 - DNA, 20 bp, synthetic construct
  source 1..20: mol_type = other DNA; note = Description of Artificial Sequence: Synthetic oligonucleotide; note = Description of Combined DNA/RNA Molecule: Synthetic oligonucleotide
  modified_base 1: mod_base = OTHER; note = 2'-O-methylcytidine-3'- phosphorothioate
  modified_base 2: mod_base = OTHER; note = 2'-O-methyladenosine-3'- phosphorothioate
  modified_base 3: mod_base = OTHER; note = 2'-O-methyluridine-3'-phosphorothioate
  modified_base 4: mod_base = OTHER; note = 2'-O-methyluridine-3'-phosphorothioate
  modified_base 5: mod_base = OTHER; note = 2'-O-methyladenosine-3'- phosphorothioate
  modified_base 6: mod_base = OTHER; note = 2'-deoxyguanosine-3'-phosphorothioate
  modified_base 7: mod_base = OTHER; note = 2'-deoxyadenosine-3'-phosphorothioate
  modified_base 8: mod_base = OTHER; note = 2'-deoxyadenosine-3'-phosphorothioate
  modified_base 9: mod_base = OTHER; note = 2'-deoxyguanosine-3'-phosphorothioate
  modified_base 10: mod_base = OTHER; note = 2'-deoxyadenosine-3'-phosphorothioate
  modified_base 11: mod_base = OTHER; note = 2'-deoxyadenosine-3'-phosphorothioate
  modified_base 12: mod_base = OTHER; note = 2'-deoxyadenosine-3'-phosphorothioate
  modified_base 13: mod_base = OTHER; note = 2'-deoxyadenosine-3'-phosphorothioate
  modified_base 14: mod_base = OTHER; note = 2'-deoxyguanosine-3'-phosphorothioate
  modified_base 15: mod_base = OTHER; note = 2'-deoxyguanosine-3'-phosphorothioate
  modified_base 16: mod_base = OTHER; note = 2'-O-methyluridine-3'-phosphorothioate
  modified_base 17: mod_base = OTHER; note = 2'-O-methylguanosine-3'- phosphorothioate
  modified_base 18: mod_base = OTHER; note = 2'-O-methylguanosine-3'- phosphorothioate
  modified_base 19: mod_base = OTHER; note = 2'-O-methylguanosine-3'- phosphorothioate
  modified_base 20: mod_base = OTHER; note = 2'-O-methyladenosine-3'-phosphate
  misc_feature 1..5: note = RNA
  misc_feature 6..15: note = DNA
  misc_feature 16..20: note = RNA
cattagaagaaaaggtggga

SEQ ID NO: 198 - DNA, 20 bp, synthetic construct
  source 1..20: mol_type = other DNA; note = Description of Artificial Sequence: Synthetic oligonucleotide; note = Description of Combined DNA/RNA Molecule: Synthetic oligonucleotide
  modified_base 1: mod_base = OTHER; note = 2'-O-methyluridine-3'-phosphorothioate
  modified_base 2: mod_base = OTHER; note = 2'-O-methylcytidine-3'- phosphorothioate
  modified_base 3: mod_base = OTHER; note = 2'-O-methyladenosine-3'- phosphorothioate
  modified_base 4: mod_base = OTHER; note = 2'-O-methyladenosine-3'- phosphorothioate
  modified_base 5: mod_base = OTHER; note = 2'-O-methyladenosine-3'- phosphorothioate
  modified_base 6: mod_base = OTHER; note = 2'-deoxyguanosine-3'-phosphorothioate
  modified_base 7: mod_base = OTHER; note = 2'-deoxythymidine-3'-phosphorothioate
  modified_base 8: mod_base = OTHER; note = 5'-methyl-deoxycytidine-3'-phosphorothioate
  modified_base 9: mod_base = OTHER; note = 2'-deoxyguanosine-3'-phosphorothioate
  modified_base 10: mod_base = OTHER; note = 2'-deoxyadenosine-3'-phosphorothioate
  modified_base 11: mod_base = OTHER; note = 5'-methyl-deoxycytidine-3'-phosphorothioate
  modified_base 12: mod_base = OTHER; note = 2'-deoxythymidine-3'-phosphorothioate
  modified_base 13: mod_base = OTHER; note = 5'-methyl-deoxycytidine-3'-phosphorothioate
  modified_base 14: mod_base = OTHER; note = 2'-deoxyadenosine-3'-phosphorothioate
  modified_base 15: mod_base = OTHER; note = 2'-deoxythymidine-3'-phosphorothioate
  modified_base 16: mod_base = OTHER; note = 2'-O-methyluridine-3'-phosphorothioate
  modified_base 17: mod_base = OTHER; note = 2'-O-methyladenosine-3'- phosphorothioate
  modified_base 18: mod_base = OTHER; note = 2'-O-methylguanosine-3'- phosphorothioate
  modified_base 19: mod_base = OTHER; note = 2'-O-methyladenosine-3'- phosphorothioate
  modified_base 20: mod_base = OTHER; note = 2'-O-methyladenosine-3'-phosphate
  misc_feature 1..5: note = RNA
  misc_feature 6..15: note = DNA
  misc_feature 16..20: note = RNA
tcaaagtcgactcattagaa

SEQ ID NO: 199 - DNA, 20 bp, synthetic construct
  source 1..20: mol_type = other DNA; note = Description of Artificial Sequence: Synthetic oligonucleotide; note = Description of Combined DNA/RNA Molecule: Synthetic oligonucleotide
  modified_base 1: mod_base = OTHER; note = 2'-O-methylguanosine-3'- phosphorothioate
  modified_base 2: mod_base = OTHER; note = 2'-O-methylcytidine-3'- phosphorothioate
  modified_base 3: mod_base = OTHER; note = 2'-O-methyluridine-3'-phosphorothioate
  modified_base 4: mod_base = OTHER; note = 2'-O-methyluridine-3'-phosphorothioate
  modified_base 5: mod_base = OTHER; note = 2'-O-methyluridine-3'-phosphorothioate
  modified_base 6: mod_base = OTHER; note = 5'-methyl-deoxycytidine-3'-phosphorothioate
  modified_base 7: mod_base = OTHER; note = 5'-methyl-deoxycytidine-3'-phosphorothioate
  modified_base 8: mod_base = OTHER; note = 2'-deoxyadenosine-3'-phosphorothioate
  modified_base 9: mod_base = OTHER; note = 2'-deoxyguanosine-3'-phosphorothioate
  modified_base 10: mod_base = OTHER; note = 5'-methyl-deoxycytidine-3'-phosphorothioate
  modified_base 11: mod_base = OTHER; note = 2'-deoxythymidine-3'-phosphorothioate
  modified_base 12: mod_base = OTHER; note = 5'-methyl-deoxycytidine-3'-phosphorothioate
  modified_base 13: mod_base = OTHER; note = 2'-deoxyadenosine-3'-phosphorothioate
  modified_base 14: mod_base = OTHER; note = 2'-deoxyadenosine-3'-phosphorothioate
  modified_base 15: mod_base = OTHER; note = 2'-deoxyadenosine-3'-phosphorothioate
  modified_base 16: mod_base = OTHER; note = 2'-O-methylguanosine-3'- phosphorothioate
  modified_base 17: mod_base = OTHER; note = 2'-O-methyluridine-3'-phosphorothioate
  modified_base 18: mod_base = OTHER; note = 2'-O-methylcytidine-3'- phosphorothioate
  modified_base 19: mod_base = OTHER; note = 2'-O-methylguanosine-3'- phosphorothioate
  modified_base 20: mod_base = OTHER; note = 2'-O-methyladenosine-3'-phosphate
  misc_feature 1..5: note = RNA
  misc_feature 6..15: note = DNA
  misc_feature 16..20: note = RNA
gctttccagctcaaagtcga

SEQ ID NO: 200 - DNA, 20 bp, synthetic construct
  source 1..20: mol_type = other DNA; note = Description of Artificial Sequence: Synthetic oligonucleotide; note = Description of Combined DNA/RNA Molecule: Synthetic oligonucleotide
  modified_base 1: mod_base = OTHER; note = 2'-O-methylguanosine-3'- phosphorothioate
  modified_base 2: mod_base = OTHER; note = 2'-O-methyladenosine-3'- phosphorothioate
  modified_base 3: mod_base = OTHER; note = 2'-O-methylguanosine-3'- phosphorothioate
  modified_base 4: mod_base = OTHER; note = 2'-O-methyladenosine-3'- phosphorothioate
  modified_base 5: mod_base = OTHER; note = 2'-O-methyladenosine-3'- phosphorothioate
  modified_base 6: mod_base = OTHER; note = 2'-deoxyadenosine-3'-phosphorothioate
  modified_base 7: mod_base = OTHER; note = 5'-methyl-deoxycytidine-3'-phosphorothioate
  modified_base 8: mod_base = OTHER; note = 2'-deoxyguanosine-3'-phosphorothioate
  modified_base 9: mod_base = OTHER; note = 2'-deoxyguanosine-3'-phosphorothioate
  modified_base 10: mod_base = OTHER; note = 5'-methyl-deoxycytidine-3'-phosphorothioate
  modified_base 11: mod_base = OTHER; note = 2'-deoxythymidine-3'-phosphorothioate
  modified_base 12: mod_base = OTHER; note = 2'-deoxyguanosine-3'-phosphorothioate
  modified_base 13: mod_base = OTHER; note = 5'-methyl-deoxycytidine-3'-phosphorothioate
  modified_base 14: mod_base = OTHER; note = 2'-deoxythymidine-3'-phosphorothioate
  modified_base 15: mod_base = OTHER; note = 2'-deoxythymidine-3'-phosphorothioate
  modified_base 16: mod_base = OTHER; note = 2'-O-methyluridine-3'-phosphorothioate
  modified_base 17: mod_base = OTHER; note = 2'-O-methylcytidine-3'- phosphorothioate
  modified_base 18: mod_base = OTHER; note = 2'-O-methylcytidine-3'- phosphorothioate
  modified_base 19: mod_base = OTHER; note = 2'-O-methyladenosine-3'- phosphorothioate
  modified_base 20: mod_base = OTHER; note = 2'-O-methylguanosine-3'-phosphate
  misc_feature 1..5: note = RNA
  misc_feature 6..15: note = DNA
  misc_feature 16..20: note = RNA
gagaaacggctgctttccag

SEQ ID NO: 201 - DNA, 20 bp, synthetic construct
  source 1..20: mol_type = other DNA; note = Description of Artificial Sequence: Synthetic oligonucleotide; note = Description of Combined DNA/RNA Molecule: Synthetic oligonucleotide
  modified_base 1: mod_base = OTHER; note = 2'-O-methylcytidine-3'- phosphorothioate
  modified_base 2: mod_base = OTHER; note = 2'-O-methyladenosine-3'- phosphorothioate
  modified_base 3: mod_base = OTHER; note = 2'-O-methylcytidine-3'- phosphorothioate
  modified_base 4: mod_base = OTHER; note = 2'-O-methyluridine-3'-phosphorothioate
  modified_base 5: mod_base = OTHER; note = 2'-O-methyluridine-3'-phosphorothioate
  modified_base 6: mod_base = OTHER; note = 2'-deoxyadenosine-3'-phosphorothioate
  modified_base 7: mod_base = OTHER; note = 2'-deoxyguanosine-3'-phosphorothioate
  modified_base 8: mod_base = OTHER; note = 2'-deoxyadenosine-3'-phosphorothioate
  modified_base 9: mod_base = OTHER; note = 5'-methyl-deoxycytidine-3'-phosphorothioate
  modified_base 10: mod_base = OTHER; note = 5'-methyl-deoxycytidine-3'-phosphorothioate
  modified_base 11: mod_base = OTHER; note = 2'-deoxyadenosine-3'-phosphorothioate
  modified_base 12: mod_base = OTHER; note = 2'-deoxyadenosine-3'-phosphorothioate
  modified_base 13: mod_base = OTHER; note = 2'-deoxyguanosine-3'-phosphorothioate
  modified_base 14: mod_base = OTHER; note = 2'-deoxyguanosine-3'-phosphorothioate
  modified_base 15: mod_base = OTHER; note = 2'-deoxyadenosine-3'-phosphorothioate
  modified_base 16: mod_base = OTHER; note = 2'-O-methylguanosine-3'- phosphorothioate
  modified_base 17: mod_base = OTHER; note = 2'-O-methyladenosine-3'- phosphorothioate
  modified_base 18: mod_base = OTHER; note = 2'-O-methyladenosine-3'- phosphorothioate
  modified_base 19: mod_base = OTHER; note = 2'-O-methyladenosine-3'- phosphorothioate
  modified_base 20: mod_base = OTHER; note = 2'-O-methylcytidine-3'-phosphate
  misc_feature 1..5: note = RNA
  misc_feature 6..15: note = DNA
  misc_feature 16..20: note = RNA
cacttagaccaaggagaaac

SEQ ID NO: 202 - DNA, 20 bp, synthetic construct
  source 1..20: mol_type = other DNA; note = Description of Artificial Sequence: Synthetic oligonucleotide; note = Description of Combined DNA/RNA Molecule: Synthetic oligonucleotide
  modified_base 1: mod_base = OTHER; note = 2'-O-methylcytidine-3'- phosphorothioate
  modified_base 2: mod_base = OTHER; note = 2'-O-methyladenosine-3'- phosphorothioate
  modified_base 3: mod_base = OTHER; note = 2'-O-methyluridine-3'-phosphorothioate
  modified_base 4: mod_base = OTHER; note = 2'-O-methylguanosine-3'- phosphorothioate
  modified_base 5: mod_base = OTHER; note = 2'-O-methylcytidine-3'- phosphorothioate
  modified_base 6: mod_base = OTHER; note = 2'-deoxyadenosine-3'-phosphorothioate
  modified_base 7: mod_base = OTHER; note = 2'-deoxyguanosine-3'-phosphorothioate
  modified_base 8: mod_base = OTHER; note = 5'-methyl-deoxycytidine-3'-phosphorothioate
  modified_base 9: mod_base = OTHER; note = 2'-deoxyadenosine-3'-phosphorothioate
  modified_base 10: mod_base = OTHER; note = 5'-methyl-deoxycytidine-3'-phosphorothioate
  modified_base 11: mod_base = OTHER; note = 2'-deoxyadenosine-3'-phosphorothioate
  modified_base 12: mod_base = OTHER; note = 5'-methyl-deoxycytidine-3'-phosphorothioate
  modified_base 13: mod_base = OTHER; note = 2'-deoxythymidine-3'-phosphorothioate
  modified_base 14: mod_base = OTHER; note = 2'-deoxythymidine-3'-phosphorothioate
  modified_base 15: mod_base = OTHER; note = 2'-deoxyadenosine-3'-phosphorothioate
  modified_base 16: mod_base = OTHER; note = 2'-O-methylguanosine-3'- phosphorothioate
  modified_base 17: mod_base = OTHER; note = 2'-O-methyladenosine-3'- phosphorothioate
  modified_base 18: mod_base = OTHER; note = 2'-O-methylcytidine-3'- phosphorothioate
  modified_base 19: mod_base = OTHER; note = 2'-O-methylcytidine-3'- phosphorothioate
  modified_base 20: mod_base = OTHER; note = 2'-O-methyladenosine-3'-phosphate
  misc_feature 1..5: note = RNA
  misc_feature 6..15: note = DNA
  misc_feature 16..20: note = RNA
catgcagcacacttagacca

SEQ ID NO: 203 - DNA, 20 bp, synthetic construct
  source 1..20: mol_type = other DNA; note = Description of Artificial Sequence: Synthetic oligonucleotide; note = Description of Combined DNA/RNA Molecule: Synthetic oligonucleotide
  modified_base 1: mod_base = OTHER; note = 2'-O-methyluridine-3'-phosphorothioate
  modified_base 2: mod_base = OTHER; note = 2'-O-methyladenosine-3'- phosphorothioate
  modified_base 3: mod_base = OTHER; note = 2'-O-methylcytidine-3'- phosphorothioate
  modified_base 4: mod_base = OTHER; note = 2'-O-methyluridine-3'-phosphorothioate
  modified_base 5: mod_base = OTHER; note = 2'-O-methylguanosine-3'- phosphorothioate
  modified_base 6: mod_base = OTHER; note = 5'-methyl-deoxycytidine-3'-phosphorothioate
  modified_base 7: mod_base = OTHER; note = 2'-deoxythymidine-3'-phosphorothioate
  modified_base 8: mod_base = OTHER; note = 5'-methyl-deoxycytidine-3'-phosphorothioate
  modified_base 9: mod_base = OTHER; note = 2'-deoxyadenosine-3'-phosphorothioate
  modified_base 10: mod_base = OTHER; note = 5'-methyl-deoxycytidine-3'-phosphorothioate
  modified_base 11: mod_base = OTHER; note = 2'-deoxythymidine-3'-phosphorothioate
  modified_base 12: mod_base = OTHER; note = 5'-methyl-deoxycytidine-3'-phosphorothioate
  modified_base 13: mod_base = OTHER; note = 5'-methyl-deoxycytidine-3'-phosphorothioate
  modified_base 14: mod_base = OTHER; note = 2'-deoxyadenosine-3'-phosphorothioate
  modified_base 15: mod_base = OTHER; note = 2'-deoxythymidine-3'-phosphorothioate
  modified_base 16: mod_base = OTHER; note = 2'-O-methylguanosine-3'- phosphorothioate
  modified_base 17: mod_base = OTHER; note = 2'-O-methylcytidine-3'- phosphorothioate
  modified_base 18: mod_base = OTHER; note = 2'-O-methyladenosine-3'- phosphorothioate
  modified_base 19: mod_base = OTHER; note = 2'-O-methylguanosine-3'- phosphorothioate
  modified_base 20: mod_base = OTHER; note = 2'-O-methylcytidine-3'-phosphate
  misc_feature 1..5: note = RNA
  misc_feature 6..15: note = DNA
  misc_feature 16..20: note = RNA
tactgctcactccatgcagc

SEQ ID NO: 204 - DNA, 20 bp, synthetic construct
  source 1..20: mol_type = other DNA; note = Description of Artificial Sequence: Synthetic oligonucleotide; note = Description of Combined DNA/RNA Molecule: Synthetic oligonucleotide
  modified_base 1: mod_base = OTHER; note = 2'-O-methylcytidine-3'- phosphorothioate
  modified_base 2: mod_base = OTHER; note = 2'-O-methyluridine-3'-phosphorothioate
  modified_base 3: mod_base = OTHER; note = 2'-O-methylguanosine-3'- phosphorothioate
  modified_base 4: mod_base = OTHER; note = 2'-O-methylcytidine-3'- phosphorothioate
  modified_base 5: mod_base = OTHER; note = 2'-O-methyladenosine-3'- phosphorothioate
  modified_base 6: mod_base = OTHER; note = 2'-deoxyguanosine-3'-phosphorothioate
  modified_base 7: mod_base = OTHER; note = 2'-deoxyguanosine-3'-phosphorothioate
  modified_base 8: mod_base = OTHER; note = 5'-methyl-deoxycytidine-3'-phosphorothioate
  modified_base 9: mod_base = OTHER; note = 2'-deoxythymidine-3'-phosphorothioate
  modified_base 10: mod_base = OTHER; note = 2'-deoxythymidine-3'-phosphorothioate
  modified_base 11: mod_base = OTHER; note = 5'-methyl-deoxycytidine-3'-phosphorothioate
  modified_base 12: mod_base = OTHER; note = 2'-deoxythymidine-3'-phosphorothioate
  modified_base 13: mod_base = OTHER; note = 2'-deoxyadenosine-3'-phosphorothioate
  modified_base 14: mod_base = OTHER; note = 5'-methyl-deoxycytidine-3'-phosphorothioate
  modified_base 15: mod_base = OTHER; note = 2'-deoxythymidine-3'-phosphorothioate
  modified_base 16: mod_base = OTHER; note = 2'-O-methylguanosine-3'- phosphorothioate
  modified_base 17: mod_base = OTHER; note = 2'-O-methylcytidine-3'- phosphorothioate
  modified_base 18: mod_base = OTHER; note = 2'-O-methyluridine-3'-phosphorothioate
  modified_base 19: mod_base = OTHER; note = 2'-O-methylcytidine-3'- phosphorothioate
  modified_base 20: mod_base = OTHER; note = 2'-O-methyladenosine-3'-phosphate
  misc_feature 1..5: note = RNA
  misc_feature 6..15: note = DNA
  misc_feature 16..20: note = RNA
ctgcaggcttctactgctca

SEQ ID NO: 205 - DNA, 20 bp, synthetic construct
  source 1..20: mol_type = other DNA; note = Description of Artificial Sequence: Synthetic oligonucleotide; note = Description of Combined DNA/RNA Molecule: Synthetic oligonucleotide
  modified_base 1: mod_base = OTHER; note = 2'-O-methylcytidine-3'- phosphorothioate
  modified_base 2: mod_base = OTHER; note = 2'-O-methyladenosine-3'- phosphorothioate
  modified_base 3: mod_base = OTHER; note = 2'-O-methyluridine-3'-phosphorothioate
  modified_base 4: mod_base = OTHER; note = 2'-O-methyluridine-3'-phosphorothioate
  modified_base 5: mod_base = OTHER; note = 2'-O-methyluridine-3'-phosphorothioate
  modified_base 6: mod_base = OTHER; note = 2'-deoxyguanosine-3'-phosphorothioate
  modified_base 7: mod_base = OTHER; note = 2'-deoxythymidine-3'-phosphorothioate
  modified_base 8: mod_base = OTHER; note = 2'-deoxyguanosine-3'-phosphorothioate
  modified_base 9: mod_base = OTHER; note = 5'-methyl-deoxycytidine-3'-phosphorothioate
  modified_base 10: mod_base = OTHER; note = 5'-methyl-deoxycytidine-3'-phosphorothioate
  modified_base 11: mod_base = OTHER; note = 2'-deoxyguanosine-3'-phosphorothioate
  modified_base 12: mod_base = OTHER; note = 5'-methyl-deoxycytidine-3'-phosphorothioate
  modified_base 13: mod_base = OTHER; note = 2'-deoxythymidine-3'-phosphorothioate
  modified_base 14: mod_base = OTHER; note = 2'-deoxyguanosine-3'-phosphorothioate
  modified_base 15: mod_base = OTHER; note = 5'-methyl-deoxycytidine-3'-phosphorothioate
  modified_base 16: mod_base = OTHER; note = 2'-O-methyladenosine-3'- phosphorothioate
  modified_base 17: mod_base = OTHER; note = 2'-O-methylguanosine-3'- phosphorothioate
  modified_base 18: mod_base = OTHER; note = 2'-O-methylguanosine-3'- phosphorothioate
  modified_base 19: mod_base = OTHER; note = 2'-O-methylcytidine-3'- phosphorothioate
  modified_base 20: mod_base = OTHER; note = 2'-O-methyluridine-3'-phosphate
  misc_feature 1..5: note = RNA
  misc_feature 6..15: note = DNA
  misc_feature 16..20: note = RNA
catttgtgccgctgcaggct

SEQ ID NO: 206 - DNA, 20 bp, synthetic construct
  source 1..20: mol_type = other DNA; note = Description of Artificial Sequence: Synthetic oligonucleotide; note = Description of Combined DNA/RNA Molecule: Synthetic oligonucleotide
  modified_base 1: mod_base = OTHER; note = 2'-O-methyladenosine-3'- phosphorothioate
  modified_base 2: mod_base = OTHER; note = 2'-O-methyladenosine-3'- phosphorothioate
  modified_base 3: mod_base = OTHER; note = 2'-O-methylcytidine-3'- phosphorothioate
  modified_base 4: mod_base = OTHER; note = 2'-O-methyluridine-3'-phosphorothioate
  modified_base 5: mod_base = OTHER; note = 2'-O-methylguanosine-3'- phosphorothioate
  modified_base 6: mod_base = OTHER; note = 2'-deoxyguanosine-3'-phosphorothioate
  modified_base 7: mod_base = OTHER; note = 2'-deoxyguanosine-3'-phosphorothioate
  modified_base 8: mod_base = OTHER; note = 2'-deoxyadenosine-3'-phosphorothioate
  modified_base 9: mod_base = OTHER; note = 2'-deoxyguanosine-3'-phosphorothioate
  modified_base 10: mod_base = OTHER; note = 2'-deoxyguanosine-3'-phosphorothioate
  modified_base 11: mod_base = OTHER; note = 2'-deoxythymidine-3'-phosphorothioate
  modified_base 12: mod_base = OTHER; note = 2'-deoxyguanosine-3'-phosphorothioate
  modified_base 13: mod_base = OTHER; note = 5'-methyl-deoxycytidine-3'-phosphorothioate
  modified_base 14: mod_base = OTHER; note = 2'-deoxyadenosine-3'-phosphorothioate
  modified_base 15: mod_base = OTHER; note = 2'-deoxythymidine-3'-phosphorothioate
  modified_base 16: mod_base = OTHER; note = 2'-O-methyluridine-3'-phosphorothioate
  modified_base 17: mod_base = OTHER; note = 2'-O-methyluridine-3'-phosphorothioate
  modified_base 18: mod_base = OTHER; note = 2'-O-methylguanosine-3'- phosphorothioate
  modified_base 19: mod_base = OTHER; note = 2'-O-methyluridine-3'-phosphorothioate
  modified_base 20: mod_base = OTHER; note = 2'-O-methylguanosine-3'-phosphate
  misc_feature 1..5: note = RNA
  misc_feature 6..15: note = DNA
  misc_feature 16..20: note = RNA
aactgggaggtgcatttgtg

SEQ ID NO: 207 - DNA, 20 bp, synthetic construct
  source 1..20: mol_type = other DNA; note = Description of Artificial Sequence: Synthetic oligonucleotide; note = Description of Combined DNA/RNA Molecule: Synthetic oligonucleotide
  modified_base 1: mod_base = OTHER; note = 2'-O-methyladenosine-3'- phosphorothioate
  modified_base 2: mod_base = OTHER; note = 2'-O-methyladenosine-3'- phosphorothioate
  modified_base 3: mod_base = OTHER; note = 2'-O-methylcytidine-3'- phosphorothioate
  modified_base 4: mod_base = OTHER; note = 2'-O-methylcytidine-3'- phosphorothioate
  modified_base 5: mod_base = OTHER; note = 2'-O-methylcytidine-3'- phosphorothioate
  modified_base 6: mod_base = OTHER; note = 2'-deoxyadenosine-3'-phosphorothioate
  modified_base 7: mod_base = OTHER; note = 2'-deoxyguanosine-3'-phosphorothioate
  modified_base 8: mod_base = OTHER; note = 5'-methyl-deoxycytidine-3'-phosphorothioate
  modified_base 9: mod_base = OTHER; note = 2'-deoxyadenosine-3'-phosphorothioate
  modified_base 10: mod_base = OTHER; note = 2'-deoxyadenosine-3'-phosphorothioate
  modified_base 11: mod_base = OTHER; note = 2'-deoxyadenosine-3'-phosphorothioate
  modified_base 12: mod_base = OTHER; note = 5'-methyl-deoxycytidine-3'-phosphorothioate
  modified_base 13: mod_base = OTHER; note = 2'-deoxythymidine-3'-phosphorothioate
  modified_base 14: mod_base = OTHER; note = 2'-deoxyguanosine-3'-phosphorothioate
  modified_base 15: mod_base = OTHER; note = 2'-deoxyguanosine-3'-phosphorothioate
  modified_base 16: mod_base = OTHER; note = 2'-O-methylguanosine-3'- phosphorothioate
  modified_base 17: mod_base = OTHER; note = 2'-O-methyladenosine-3'- phosphorothioate
  modified_base 18: mod_base = OTHER; note = 2'-O-methylguanosine-3'- phosphorothioate
  modified_base 19: mod_base = OTHER; note = 2'-O-methylguanosine-3'- phosphorothioate
  modified_base 20: mod_base = OTHER; note = 2'-O-methyluridine-3'-phosphate
  misc_feature 1..5: note = RNA
  misc_feature 6..15: note = DNA
  misc_feature 16..20: note = RNA
aacccagcaaactgggaggt

SEQ ID NO: 208 - DNA, 20 bp, synthetic construct
  source 1..20: mol_type = other DNA; note = Description of Artificial Sequence: Synthetic oligonucleotide; note = Description of Combined DNA/RNA Molecule: Synthetic oligonucleotide
  modified_base 1: mod_base = OTHER; note = 2'-O-methyluridine-3'-phosphorothioate
  modified_base 2: mod_base = OTHER; note = 2'-O-methylcytidine-3'- phosphorothioate
  modified_base 3: mod_base = OTHER; note = 2'-O-methyluridine-3'-phosphorothioate
  modified_base 4: mod_base = OTHER; note = 2'-O-methylcytidine-3'- phosphorothioate
  modified_base 5: mod_base = OTHER; note = 2'-O-methyluridine-3'-phosphorothioate
  modified_base 6: mod_base = OTHER; note = 2'-deoxyadenosine-3'-phosphorothioate
  modified_base 7: mod_base = OTHER; note = 2'-deoxyadenosine-3'-phosphorothioate
  modified_base 8: mod_base = OTHER; note = 2'-deoxyadenosine-3'-phosphorothioate
  modified_base 9: mod_base = OTHER; note = 2'-deoxyadenosine-3'-phosphorothioate
  modified_base 10: mod_base = OTHER; note = 2'-deoxythymidine-3'-phosphorothioate
  modified_base 11: mod_base = OTHER; note = 2'-deoxyadenosine-3'-phosphorothioate
  modified_base 12: mod_base = OTHER; note = 2'-deoxyadenosine-3'-phosphorothioate
  modified_base 13: mod_base = OTHER; note = 2'-deoxyadenosine-3'-phosphorothioate
  modified_base 14: mod_base = OTHER; note = 5'-methyl-deoxycytidine-3'-phosphorothioate
  modified_base 15: mod_base = OTHER; note = 5'-methyl-deoxycytidine-3'-phosphorothioate
  modified_base 16: mod_base = OTHER; note = 2'-O-methylcytidine-3'- phosphorothioate
  modified_base 17: mod_base = OTHER; note = 2'-O-methyladenosine-3'- phosphorothioate
  modified_base 18: mod_base = OTHER; note = 2'-O-methylguanosine-3'- phosphorothioate
  modified_base 19: mod_base = OTHER; note = 2'-O-methylcytidine-3'- phosphorothioate
  modified_base 20: mod_base = OTHER; note = 2'-O-methyladenosine-3'-phosphate
  misc_feature 1..5: note = RNA
  misc_feature 6..15: note = DNA
  misc_feature 16..20: note = RNA
tctctaaaataaacccagca

SEQ ID NO: 209 - DNA, 20 bp, synthetic construct
  source 1..20: mol_type = other DNA; note = Description of Artificial Sequence: Synthetic oligonucleotide; note = Description of Combined DNA/RNA Molecule: Synthetic oligonucleotide
  modified_base 1: mod_base = OTHER; note = 2'-O-methyluridine-3'-phosphorothioate
  modified_base 2: mod_base = OTHER; note = 2'-O-methylcytidine-3'- phosphorothioate
  modified_base 3: mod_base = OTHER; note = 2'-O-methylcytidine-3'- phosphorothioate
  modified_base 4: mod_base = OTHER; note = 2'-O-methylcytidine-3'- phosphorothioate
  modified_base 5: mod_base = OTHER; note = 2'-O-methylcytidine-3'- phosphorothioate
  modified_base 6: mod_base = OTHER; note = 2'-deoxyadenosine-3'-phosphorothioate
  modified_base 7: mod_base = OTHER; note = 5'-methyl-deoxycytidine-3'-phosphorothioate
  modified_base 8: mod_base = OTHER; note = 5'-methyl-deoxycytidine-3'-phosphorothioate
  modified_base 9: mod_base = OTHER; note = 5'-methyl-deoxycytidine-3'-phosphorothioate
  modified_base 10: mod_base = OTHER; note = 5'-methyl-deoxycytidine-3'-phosphorothioate
  modified_base 11: mod_base = OTHER; note = 5'-methyl-deoxycytidine-3'-phosphorothioate
  modified_base 12: mod_base = OTHER; note = 2'-deoxyadenosine-3'-phosphorothioate
  modified_base 13: mod_base = OTHER; note = 2'-deoxythymidine-3'-phosphorothioate
  modified_base 14: mod_base = OTHER; note = 2'-deoxythymidine-3'-phosphorothioate
  modified_base 15: mod_base = OTHER; note = 5'-methyl-deoxycytidine-3'-phosphorothioate
  modified_base 16: mod_base = OTHER; note = 2'-O-methyluridine-3'-phosphorothioate
  modified_base 17: mod_base = OTHER; note = 2'-O-methylcytidine-3'- phosphorothioate
  modified_base 18: mod_base = OTHER; note = 2'-O-methyluridine-3'-phosphorothioate
  modified_base 19: mod_base = OTHER; note = 2'-O-methyladenosine-3'- phosphorothioate
  modified_base 20: mod_base = OTHER; note = 2'-O-methyladenosine-3'-phosphate
  misc_feature 1..5: note = RNA
  misc_feature 6..15: note = DNA
  misc_feature 16..20: note = RNA
tccccacccccattctctaa

SEQ ID NO: 210 - DNA, 20 bp, synthetic construct
  source 1..20: mol_type = other DNA; note = Description of Artificial Sequence: Synthetic oligonucleotide; note = Description of Combined DNA/RNA Molecule: Synthetic oligonucleotide
  modified_base 1: mod_base = OTHER; note = 2'-O-methyluridine-3'-phosphorothioate
  modified_base 2: mod_base = OTHER; note = 2'-O-methylguanosine-3'- phosphorothioate
  modified_base 3: mod_base = OTHER; note = 2'-O-methylguanosine-3'- phosphorothioate
  modified_base 4: mod_base = OTHER; note = 2'-O-methyluridine-3'-phosphorothioate
  modified_base 5: mod_base = OTHER; note = 2'-O-methyluridine-3'-phosphorothioate
  modified_base 6: mod_base = OTHER; note = 5'-methyl-deoxycytidine-3'-phosphorothioate
  modified_base 7: mod_base = OTHER; note = 2'-deoxythymidine-3'-phosphorothioate
  modified_base 8: mod_base = OTHER; note = 2'-deoxythymidine-3'-phosphorothioate
  modified_base 9: mod_base = OTHER; note = 2'-deoxyguanosine-3'-phosphorothioate
  modified_base 10: mod_base = OTHER; note = 5'-methyl-deoxycytidine-3'-phosphorothioate
  modified_base 11: mod_base = OTHER; note = 5'-methyl-deoxycytidine-3'-phosphorothioate
  modified_base 12: mod_base = OTHER; note = 2'-deoxythymidine-3'-phosphorothioate
  modified_base 13: mod_base = OTHER; note = 5'-methyl-deoxycytidine-3'-phosphorothioate
  modified_base 14: mod_base = OTHER; note = 5'-methyl-deoxycytidine-3'-phosphorothioate
  modified_base 15: mod_base = OTHER; note = 5'-methyl-deoxycytidine-3'-phosphorothioate
  modified_base 16: mod_base = OTHER; note = 2'-O-methylcytidine-3'- phosphorothioate
  modified_base 17: mod_base = OTHER; note = 2'-O-methyladenosine-3'- phosphorothioate
  modified_base 18: mod_base = OTHER; note = 2'-O-methylcytidine-3'- phosphorothioate
  modified_base 19: mod_base = OTHER; note = 2'-O-methylcytidine-3'- phosphorothioate
  modified_base 20: mod_base = OTHER; note = 2'-O-methylcytidine-3'-phosphate
  misc_feature 1..5: note = RNA
  misc_feature 6..15: note = DNA
  misc_feature 16..20: note = RNA
tggttcttgcctccccaccc

SEQ ID NO: 211 - DNA, 20 bp, synthetic construct
  source 1..20: mol_type = other DNA; note = Description of Artificial Sequence: Synthetic oligonucleotide; note = Description of Combined DNA/RNA Molecule: Synthetic oligonucleotide
  modified_base 1: mod_base = OTHER; note = 2'-O-methylguanosine-3'- phosphorothioate
  modified_base 2: mod_base = OTHER; note = 2'-O-methylcytidine-3'- phosphorothioate
  modified_base 3: mod_base = OTHER; note = 2'-O-methylguanosine-3'- phosphorothioate
  modified_base 4: mod_base = OTHER; note = 2'-O-methylcytidine-3'- phosphorothioate
  modified_base 5: mod_base = OTHER; note = 2'-O-methyluridine-3'-phosphorothioate
  modified_base 6: mod_base = OTHER; note = 2'-deoxyadenosine-3'-phosphorothioate
  modified_base 7: mod_base = OTHER; note = 2'-deoxyadenosine-3'-phosphorothioate
  modified_base 8: mod_base = OTHER; note = 2'-deoxyadenosine-3'-phosphorothioate
  modified_base 9: mod_base = OTHER; note = 5'-methyl-deoxycytidine-3'-phosphorothioate
  modified_base 10: mod_base = OTHER; note = 2'-deoxyadenosine-3'-phosphorothioate
  modified_base 11: mod_base = OTHER; note = 5'-methyl-deoxycytidine-3'-phosphorothioate
  modified_base 12: mod_base = OTHER; note = 2'-deoxythymidine-3'-phosphorothioate
  modified_base 13: mod_base = OTHER; note = 2'-deoxyguanosine-3'-phosphorothioate
  modified_base 14: mod_base = OTHER; note = 2'-deoxyguanosine-3'-phosphorothioate
  modified_base 15: mod_base = OTHER; note = 2'-deoxythymidine-3'-phosphorothioate
  modified_base 16: mod_base = OTHER; note = 2'-O-methyluridine-3'-phosphorothioate
  modified_base 17: mod_base = OTHER; note = 2'-O-methylcytidine-3'- phosphorothioate
  modified_base 18: mod_base = OTHER; note = 2'-O-methyluridine-3'-phosphorothioate
  modified_base 19: mod_base = OTHER; note = 2'-O-methyluridine-3'-phosphorothioate
  modified_base 20: mod_base = OTHER; note = 2'-O-methylguanosine-3'-phosphate
  misc_feature 1..5: note = RNA
  misc_feature 6..15: note = DNA
  misc_feature 16..20: note = RNA
gcgctaaacactggttcttg

SEQ ID NO: 212 - DNA, 20 bp, synthetic construct
  source 1..20: mol_type = other DNA; note = Description of Artificial Sequence: Synthetic oligonucleotide; note = Description of Combined DNA/RNA Molecule: Synthetic oligonucleotide
  modified_base 1: mod_base = OTHER; note = 2'-O-methylcytidine-3'- phosphorothioate
  modified_base 2: mod_base = OTHER; note = 2'-O-methyladenosine-3'- phosphorothioate
  modified_base 3: mod_base = OTHER; note = 2'-O-methylguanosine-3'- phosphorothioate
  modified_base 4: mod_base = OTHER; note = 2'-O-methyluridine-3'-phosphorothioate
  modified_base 5: mod_base = OTHER; note = 2'-O-methyladenosine-3'- phosphorothioate
  modified_base 6: mod_base = OTHER; note = 2'-deoxyguanosine-3'-phosphorothioate
  modified_base 7: mod_base = OTHER; note = 2'-deoxythymidine-3'-phosphorothioate
  modified_base 8: mod_base = OTHER; note = 5'-methyl-deoxycytidine-3'-phosphorothioate
  modified_base 9: mod_base = OTHER; note = 5'-methyl-deoxycytidine-3'-phosphorothioate
  modified_base 10: mod_base = OTHER; note = 5'-methyl-deoxycytidine-3'-phosphorothioate
  modified_base 11: mod_base = OTHER; note = 2'-deoxyguanosine-3'-phosphorothioate
  modified_base 12: mod_base = OTHER; note = 5'-methyl-deoxycytidine-3'-phosphorothioate
  modified_base 13: mod_base = OTHER; note = 2'-deoxyguanosine-3'-phosphorothioate
  modified_base 14: mod_base = OTHER; note = 5'-methyl-deoxycytidine-3'-phosphorothioate
  modified_base 15: mod_base = OTHER; note = 2'-deoxythymidine-3'-phosphorothioate
  modified_base 16: mod_base = OTHER; note = 2'-O-methyladenosine-3'- phosphorothioate
  modified_base 17: mod_base = OTHER; note = 2'-O-methyladenosine-3'- phosphorothioate
  modified_base 18: mod_base = OTHER; note = 2'-O-methyladenosine-3'- phosphorothioate
  modified_base 19: mod_base = OTHER; note = 2'-O-methylcytidine-3'- phosphorothioate
  modified_base 20: mod_base = OTHER; note = 2'-O-methyladenosine-3'-phosphate
  misc_feature 1..5: note = RNA
  misc_feature 6..15: note = DNA
  misc_feature 16..20: note = RNA
cagtagtcccgcgctaaaca

SEQ ID NO: 213 - DNA, 20 bp, synthetic construct
  source 1..20: mol_type = other DNA; note = Description of Artificial Sequence: Synthetic oligonucleotide; note = Description of Combined DNA/RNA Molecule: Synthetic oligonucleotide
  modified_base 1: mod_base = OTHER; note = 2'-O-methyluridine-3'-phosphorothioate
  modified_base 2: mod_base = OTHER; note = 2'-O-methylcytidine-3'- phosphorothioate
  modified_base 3: mod_base = OTHER; note = 2'-O-methyluridine-3'-phosphorothioate
  modified_base 4: mod_base = OTHER; note = 2'-O-methyluridine-3'-phosphorothioate
  modified_base 5: mod_base = OTHER; note = 2'-O-methyluridine-3'-phosphorothioate
  modified_base 6: mod_base = OTHER; note = 2'-deoxythymidine-3'-phosphorothioate
  modified_base 7: mod_base = OTHER; note = 2'-deoxythymidine-3'-phosphorothioate
  modified_base 8: mod_base = OTHER; note = 2'-deoxyguanosine-3'-phosphorothioate
  modified_base 9: mod_base = OTHER; note = 2'-deoxyguanosine-3'-phosphorothioate
  modified_base 10: mod_base = OTHER; note = 2'-deoxyadenosine-3'-phosphorothioate
  modified_base 11: mod_base = OTHER; note = 2'-deoxyadenosine-3'-phosphorothioate
  modified_base 12: mod_base = OTHER; note = 5'-methyl-deoxycytidine-3'-phosphorothioate
  modified_base 13: mod_base = OTHER; note = 2'-deoxyadenosine-3'-phosphorothioate
  modified_base 14: mod_base = OTHER; note = 2'-deoxyguanosine-3'-phosphorothioate
  modified_base 15: mod_base = OTHER; note = 2'-deoxythymidine-3'-phosphorothioate
  modified_base 16: mod_base = OTHER; note = 2'-O-methyladenosine-3'- phosphorothioate
  modified_base 17: mod_base = OTHER; note = 2'-O-methylguanosine-3'- phosphorothioate
  modified_base 18: mod_base = OTHER; note = 2'-O-methyluridine-3'-phosphorothioate
  modified_base 19: mod_base = OTHER; note = 2'-O-methylcytidine-3'- phosphorothioate
  modified_base 20: mod_base = OTHER; note = 2'-O-methylcytidine-3'-phosphate
  misc_feature 1..5: note = RNA
  misc_feature 6..15: note = DNA
  misc_feature 16..20: note = RNA
tctttttggaacagtagtcc

SEQ ID NO: 214 - DNA, 20 bp, synthetic construct
  source 1..20: mol_type = other DNA; note = Description of Artificial Sequence: Synthetic oligonucleotide; note = Description of Combined DNA/RNA Molecule: Synthetic oligonucleotide
  modified_base 1: mod_base = OTHER; note = 2'-O-methylcytidine-3'- phosphorothioate
  modified_base 2: mod_base = OTHER; note = 2'-O-methylguanosine-3'- phosphorothioate
  modified_base 3: mod_base = OTHER; note = 2'-O-methylguanosine-3'- phosphorothioate
  modified_base 4: mod_base = OTHER; note = 2'-O-methyluridine-3'-phosphorothioate
  modified_base 5: mod_base = OTHER; note = 2'-O-methyluridine-3'-phosphorothioate
  modified_base 6: mod_base = OTHER; note = 2'-deoxyguanosine-3'-phosphorothioate
  modified_base 7: mod_base = OTHER; note = 2'-deoxyguanosine-3'-phosphorothioate
  modified_base 8: mod_base = OTHER; note = 2'-deoxyadenosine-3'-phosphorothioate
  modified_base 9: mod_base = OTHER; note = 2'-deoxyadenosine-3'-phosphorothioate
  modified_base 10: mod_base = OTHER; note = 2'-deoxythymidine-3'-phosphorothioate
  modified_base 11: mod_base = OTHER; note = 2'-deoxythymidine-3'-phosphorothioate
  modified_base 12: mod_base = OTHER; note = 5'-methyl-deoxycytidine-3'-phosphorothioate
  modified_base 13: mod_base = OTHER; note = 2'-deoxythymidine-3'-phosphorothioate
  modified_base 14: mod_base = OTHER; note = 2'-deoxythymidine-3'-phosphorothioate
  modified_base 15: mod_base = OTHER; note = 2'-deoxythymidine-3'-phosphorothioate
  modified_base 16: mod_base = OTHER; note = 2'-O-methyluridine-3'-phosphorothioate
  modified_base 17: mod_base = OTHER; note = 2'-O-methyluridine-3'-phosphorothioate
  modified_base 18: mod_base = OTHER; note = 2'-O-methylguanosine-3'- phosphorothioate
  modified_base 19: mod_base = OTHER; note = 2'-O-methylguanosine-3'- phosphorothioate
  modified_base 20: mod_base = OTHER; note = 2'-O-methyladenosine-3'-phosphate
  misc_feature 1..5: note = RNA
  misc_feature 6..15: note = DNA
  misc_feature 16..20: note = RNA
cggttggaattctttttgga

SEQ ID NO: 215 - DNA, 20 bp, synthetic construct
  source 1..20: mol_type = other DNA; note = Description of Artificial Sequence: Synthetic oligonucleotide; note = Description of Combined DNA/RNA Molecule: Synthetic oligonucleotide
  modified_base 1: mod_base = OTHER; note = 2'-O-methyladenosine-3'- phosphorothioate
  modified_base 2: mod_base = OTHER; note = 2'-O-methyladenosine-3'- phosphorothioate
  modified_base 3: mod_base = OTHER; note = 2'-O-methylcytidine-3'- phosphorothioate
  modified_base 4: mod_base = OTHER; note = 2'-O-methyladenosine-3'- phosphorothioate
  modified_base 5: mod_base = OTHER; note = 2'-O-methyladenosine-3'- phosphorothioate
  modified_base 6: mod_base = OTHER; note = 2'-deoxyguanosine-3'-phosphorothioate
  modified_base 7: mod_base = OTHER; note = 5'-methyl-deoxycytidine-3'-phosphorothioate
  modified_base 8: mod_base = OTHER; note = 2'-deoxythymidine-3'-phosphorothioate
  modified_base 9: mod_base = OTHER; note = 2'-deoxyguanosine-3'-phosphorothioate
  modified_base 10: mod_base = OTHER; note = 2'-deoxyguanosine-3'-phosphorothioate
  modified_base 11: mod_base = OTHER; note = 2'-deoxythymidine-3'-phosphorothioate
  modified_base 12: mod_base = OTHER; note = 5'-methyl-deoxycytidine-3'-phosphorothioate
  modified_base 13: mod_base = OTHER; note = 2'-deoxyguanosine-3'-phosphorothioate
  modified_base 14: mod_base = OTHER; note = 2'-deoxyguanosine-3'-phosphorothioate
  modified_base 15: mod_base = OTHER; note = 2'-deoxythymidine-3'-phosphorothioate
  modified_base 16: mod_base = OTHER; note = 2'-O-methyluridine-3'-phosphorothioate
  modified_base 17: mod_base = OTHER; note = 2'-O-methylguanosine-3'- phosphorothioate
  modified_base 18: mod_base = OTHER; note = 2'-O-methylguanosine-3'- phosphorothioate
  modified_base 19: mod_base = OTHER; note = 2'-O-methyladenosine-3'- phosphorothioate
  modified_base 20: mod_base = OTHER; note = 2'-O-methyladenosine-3'-phosphate
  misc_feature 1..5: note = RNA
  misc_feature 6..15: note = DNA
  misc_feature 16..20: note = RNA
aacaagctggtcggttggaa

SEQ ID NO: 216 - DNA, 20 bp, synthetic construct
  source 1..20: mol_type = other DNA; note = Description of Artificial Sequence: Synthetic oligonucleotide; note = Description of Combined DNA/RNA Molecule: Synthetic oligonucleotide
  modified_base 1: mod_base = OTHER; note = 2'-O-methyluridine-3'-phosphorothioate
  modified_base 2: mod_base = OTHER; note = 2'-O-methyluridine-3'-phosphorothioate
  modified_base 3: mod_base = OTHER; note = 2'-O-methyluridine-3'-phosphorothioate
  modified_base 4: mod_base = OTHER; note = 2'-O-methyluridine-3'-phosphorothioate
  modified_base 5: mod_base = OTHER; note = 2'-O-methylguanosine-3'- phosphorothioate
  modified_base 6: mod_base = OTHER; note = 2'-deoxythymidine-3'-phosphorothioate
  modified_base 7: mod_base = OTHER; note = 2'-deoxythymidine-3'-phosphorothioate
  modified_base 8: mod_base = OTHER; note = 2'-deoxythymidine-3'-phosphorothioate
  modified_base 9: mod_base = OTHER; note = 5'-methyl-deoxycytidine-3'-phosphorothioate
  modified_base 10: mod_base = OTHER; note = 2'-deoxyadenosine-3'-phosphorothioate
  modified_base 11: mod_base = OTHER; note = 5'-methyl-deoxycytidine-3'-phosphorothioate
  modified_base 12: mod_base = OTHER; note = 2'-deoxyadenosine-3'-phosphorothioate
  modified_base 13: mod_base = OTHER; note = 2'-deoxyadenosine-3'-phosphorothioate
  modified_base 14: mod_base = OTHER; note = 2'-deoxyadenosine-3'-phosphorothioate
  modified_base 15: mod_base = OTHER; note = 5'-methyl-deoxycytidine-3'-phosphorothioate
  modified_base 16: mod_base = OTHER; note = 2'-O-methyladenosine-3'- phosphorothioate
  modified_base 17: mod_base = OTHER; note = 2'-O-methyladenosine-3'- phosphorothioate
  modified_base 18: mod_base = OTHER; note = 2'-O-methylguanosine-3'- phosphorothioate
  modified_base 19: mod_base = OTHER; note = 2'-O-methylcytidine-3'- phosphorothioate
  modified_base 20: mod_base = OTHER; note = 2'-O-methyluridine-3'-phosphate
  misc_feature 1..5: note = RNA
  misc_feature 6..15: note = DNA
  misc_feature 16..20: note = RNA
ttttgtttcacaaacaagct

SEQ ID NO: 217 - DNA, 20 bp, synthetic construct
  source 1..20: mol_type = other DNA; note = Description of Artificial Sequence: Synthetic oligonucleotide; note = Description of Combined DNA/RNA Molecule: Synthetic oligonucleotide
  modified_base 1: mod_base = OTHER; note = 2'-O-methyladenosine-3'- phosphorothioate
  modified_base 2: mod_base = OTHER; note = 2'-O-methyladenosine-3'- phosphorothioate
  modified_base 3: mod_base = OTHER; note = 2'-O-methylguanosine-3'- phosphorothioate
  modified_base 4: mod_base = OTHER; note = 2'-O-methylguanosine-3'- phosphorothioate
  modified_base 5: mod_base = OTHER; note = 2'-O-methylguanosine-3'- phosphorothioate
  modified_base 6: mod_base = OTHER; note = 2'-deoxyadenosine-3'-phosphorothioate
  modified_base 7: mod_base = OTHER; note = 2'-deoxyadenosine-3'-phosphorothioate
  modified_base 8: mod_base = OTHER; note = 5'-methyl-deoxycytidine-3'-phosphorothioate
  modified_base 9: mod_base = OTHER; note = 2'-deoxyadenosine-3'-phosphorothioate
  modified_base 10: mod_base = OTHER; note = 5'-methyl-deoxycytidine-3'-phosphorothioate
  modified_base 11: mod_base = OTHER; note = 2'-deoxythymidine-3'-phosphorothioate
  modified_base 12: mod_base = OTHER; note = 2'-deoxythymidine-3'-phosphorothioate
  modified_base 13: mod_base = OTHER; note = 2'-deoxythymidine-3'-phosphorothioate
  modified_base 14: mod_base = OTHER; note = 2'-deoxythymidine-3'-phosphorothioate
  modified_base 15: mod_base = OTHER; note = 2'-deoxythymidine-3'-phosphorothioate
  modified_base 16: mod_base = OTHER; note = 2'-O-methyluridine-3'-phosphorothioate
  modified_base 17: mod_base = OTHER; note = 2'-O-methylguanosine-3'- phosphorothioate
  modified_base 18: mod_base = OTHER; note = 2'-O-methyluridine-3'-phosphorothioate
  modified_base 19: mod_base = OTHER; note = 2'-O-methyluridine-3'-phosphorothioate
  modified_base 20: mod_base = OTHER; note = 2'-O-methyluridine-3'-phosphate
  misc_feature 1..5: note = RNA
  misc_feature 6..15: note = DNA
  misc_feature 16..20: note = RNA
aagggaacacttttttgttt

SEQ ID NO: 218 - DNA, 20 bp, synthetic construct
  source 1..20: mol_type = other DNA; note = Description of Artificial Sequence: Synthetic oligonucleotide; note = Description of Combined DNA/RNA Molecule: Synthetic oligonucleotide
  modified_base 1: mod_base = OTHER; note = 2'-O-methylcytidine-3'- phosphorothioate
  modified_base 2: mod_base = OTHER; note = 2'-O-methyladenosine-3'- phosphorothioate
  modified_base 3: mod_base = OTHER; note = 2'-O-methyladenosine-3'- phosphorothioate
  modified_base 4: mod_base = OTHER; note = 2'-O-methylcytidine-3'- phosphorothioate
  modified_base 5: mod_base = OTHER; note = 2'-O-methyluridine-3'-phosphorothioate
  modified_base 6: mod_base = OTHER; note = 2'-deoxythymidine-3'-phosphorothioate
  modified_base 7: mod_base = OTHER; note = 2'-deoxyguanosine-3'-phosphorothioate
  modified_base 8: mod_base = OTHER; note = 2'-deoxyadenosine-3'-phosphorothioate
  modified_base 9: mod_base = OTHER; note = 2'-deoxyadenosine-3'-phosphorothioate
  modified_base 10: mod_base = OTHER; note = 2'-deoxyadenosine-3'-phosphorothioate
  modified_base 11: mod_base = OTHER; note = 2'-deoxyadenosine-3'-phosphorothioate
  modified_base 12: mod_base = OTHER; note = 2'-deoxyguanosine-3'-phosphorothioate
  modified_base 13: mod_base = OTHER; note = 2'-deoxyguanosine-3'-phosphorothioate
  modified_base 14: mod_base = OTHER; note = 2'-deoxyguanosine-3'-phosphorothioate
  modified_base 15: mod_base = OTHER; note = 2'-deoxyadenosine-3'-phosphorothioate
  modified_base 16: mod_base = OTHER; note = 2'-O-methyladenosine-3'- phosphorothioate
  modified_base 17: mod_base = OTHER; note = 2'-O-methylcytidine-3'- phosphorothioate
  modified_base 18: mod_base = OTHER; note = 2'-O-methyladenosine-3'- phosphorothioate
  modified_base 19: mod_base = OTHER; note = 2'-O-methylcytidine-3'- phosphorothioate
  modified_base 20: mod_base = OTHER; note = 2'-O-methyluridine-3'-phosphate
  misc_feature 1..5: note = RNA
  misc_feature 6..15: note = DNA
  misc_feature 16..20: note = RNA
caacttgaaaagggaacact

SEQ ID NO: 219 - DNA, 20 bp, synthetic construct
  source 1..20: mol_type = other DNA; note = Description of Artificial Sequence: Synthetic oligonucleotide; note = Description of Combined DNA/RNA Molecule: Synthetic oligonucleotide
  modified_base 1: mod_base = OTHER; note = 2'-O-methyladenosine-3'- phosphorothioate
  modified_base 2: mod_base = OTHER; note = 2'-O-methyluridine-3'-phosphorothioate
  modified_base 3: mod_base = OTHER; note = 2'-O-methyluridine-3'-phosphorothioate
  modified_base 4: mod_base = OTHER; note = 2'-O-methyluridine-3'-phosphorothioate
  modified_base 5: mod_base = OTHER; note = 2'-O-methyluridine-3'-phosphorothioate
  modified_base 6: mod_base = OTHER; note = 2'-deoxythymidine-3'-phosphorothioate
  modified_base 7: mod_base = OTHER; note = 2'-deoxyguanosine-3'-phosphorothioate
  modified_base 8: mod_base = OTHER; note = 2'-deoxythymidine-3'-phosphorothioate
  modified_base 9: mod_base = OTHER; note = 2'-deoxythymidine-3'-phosphorothioate
  modified_base 10: mod_base = OTHER; note = 5'-methyl-deoxycytidine-3'-phosphorothioate
  modified_base 11: mod_base = OTHER; note = 2'-deoxythymidine-3'-phosphorothioate
  modified_base 12: mod_base = OTHER; note = 5'-methyl-deoxycytidine-3'-phosphorothioate
  modified_base 13: mod_base = OTHER; note = 2'-deoxyadenosine-3'-phosphorothioate
  modified_base 14: mod_base = OTHER; note = 2'-deoxyadenosine-3'-phosphorothioate
  modified_base 15: mod_base = OTHER; note = 5'-methyl-deoxycytidine-3'-phosphorothioate
  modified_base 16: mod_base = OTHER; note = 2'-O-methyluridine-3'-phosphorothioate
  modified_base 17: mod_base = OTHER; note = 2'-O-methyluridine-3'-phosphorothioate
  modified_base 18: mod_base = OTHER; note = 2'-O-methylguanosine-3'- phosphorothioate
  modified_base 19: mod_base = OTHER; note = 2'-O-methyladenosine-3'- phosphorothioate
  modified_base 20: mod_base = OTHER; note = 2'-O-methyladenosine-3'-phosphate
  misc_feature 1..5: note = RNA
  misc_feature 6..15: note = DNA
  misc_feature 16..20: note = RNA
atttttgttctcaacttgaa

SEQ ID NO: 220 - DNA, 20 bp, synthetic construct
  source 1..20: mol_type = other DNA; note = Description of Artificial Sequence: Synthetic oligonucleotide; note = Description of Combined DNA/RNA Molecule: Synthetic oligonucleotide
  modified_base 1: mod_base = OTHER; note = 2'-O-methyladenosine-3'- phosphorothioate
  modified_base 2: mod_base = OTHER; note = 2'-O-methyluridine-3'-phosphorothioate
  modified_base 3: mod_base = OTHER; note = 2'-O-methyluridine-3'-phosphorothioate
  modified_base 4: mod_base = OTHER; note = 2'-O-methyluridine-3'-phosphorothioate
  modified_base 5: mod_base = OTHER; note = 2'-O-methyluridine-3'-phosphorothioate
  modified_base 6: mod_base = OTHER; note = 2'-deoxyadenosine-3'-phosphorothioate
  modified_base 7: mod_base = OTHER; note = 2'-deoxyadenosine-3'-phosphorothioate
  modified_base 8: mod_base = OTHER; note = 2'-deoxyadenosine-3'-phosphorothioate
  modified_base 9: mod_base = OTHER; note = 2'-deoxyadenosine-3'-phosphorothioate
  modified_base 10: mod_base = OTHER; note = 5'-methyl-deoxycytidine-3'-phosphorothioate
  modified_base 11: mod_base = OTHER; note = 5'-methyl-deoxycytidine-3'-phosphorothioate
  modified_base 12: mod_base = OTHER; note = 5'-methyl-deoxycytidine-3'-phosphorothioate
  modified_base 13: mod_base = OTHER; note = 2'-deoxyadenosine-3'-phosphorothioate
  modified_base 14: mod_base = OTHER; note = 2'-deoxyadenosine-3'-phosphorothioate
  modified_base 15: mod_base = OTHER; note = 2'-deoxythymidine-3'-phosphorothioate
  modified_base 16: mod_base = OTHER; note = 2'-O-methyluridine-3'-phosphorothioate
  modified_base 17: mod_base = OTHER; note = 2'-O-methyluridine-3'-phosphorothioate
  modified_base 18: mod_base = OTHER; note = 2'-O-methyluridine-3'-phosphorothioate
  modified_base 19: mod_base = OTHER; note = 2'-O-methyluridine-3'-phosphorothioate
  modified_base 20: mod_base = OTHER; note = 2'-O-methylguanosine-3'-phosphate
  misc_feature 1..5: note = RNA
  misc_feature 6..15: note = DNA
  misc_feature 16..20: note = RNA
attttaaaacccaatttttg

SEQ ID NO: 221 - DNA, 20 bp, synthetic construct
  source 1..20: mol_type = other DNA; note = Description of Artificial Sequence: Synthetic oligonucleotide; note = Description of Combined DNA/RNA Molecule: Synthetic oligonucleotide
  modified_base 1: mod_base = OTHER; note = 2'-O-methyluridine-3'-phosphorothioate
  modified_base 2: mod_base = OTHER; note = 2'-O-methylguanosine-3'- phosphorothioate
  modified_base 3: mod_base = OTHER; note = 2'-O-methyluridine-3'-phosphorothioate
  modified_base 4: mod_base = OTHER; note = 2'-O-methyladenosine-3'- phosphorothioate
  modified_base 5: mod_base = OTHER; note = 2'-O-methyluridine-3'-phosphorothioate
  modified_base 6: mod_base = OTHER; note = 2'-deoxyadenosine-3'-phosphorothioate
  modified_base 7: mod_base = OTHER; note = 5'-methyl-deoxycytidine-3'-phosphorothioate
  modified_base 8: mod_base = OTHER; note = 2'-deoxythymidine-3'-phosphorothioate
  modified_base 9: mod_base = OTHER; note = 2'-deoxythymidine-3'-phosphorothioate
  modified_base 10: mod_base = OTHER; note = 2'-deoxythymidine-3'-phosphorothioate
  modified_base 11: mod_base = OTHER; note = 2'-deoxyadenosine-3'-phosphorothioate
  modified_base 12: mod_base = OTHER; note = 2'-deoxyadenosine-3'-phosphorothioate
  modified_base 13: mod_base = OTHER; note = 2'-deoxythymidine-3'-phosphorothioate
  modified_base 14: mod_base = OTHER; note = 2'-deoxythymidine-3'-phosphorothioate
  modified_base 15: mod_base = OTHER; note = 2'-deoxythymidine-3'-phosphorothioate
  modified_base 16: mod_base = OTHER; note = 2'-O-methyluridine-3'-phosphorothioate
  modified_base 17: mod_base = OTHER; note = 2'-O-methyladenosine-3'- phosphorothioate
  modified_base 18: mod_base = OTHER; note = 2'-O-methyladenosine-3'- phosphorothioate
  modified_base 19: mod_base = OTHER; note = 2'-O-methyladenosine-3'- phosphorothioate
  modified_base 20: mod_base = OTHER; note = 2'-O-methyladenosine-3'-phosphate
  misc_feature 1..5: note = RNA
  misc_feature 6..15: note = DNA
  misc_feature 16..20: note = RNA
tgtatactttaattttaaaa

SEQ ID NO: 222 - DNA, 20 bp, synthetic construct
  source 1..20: mol_type = other DNA; note = Description of Artificial Sequence: Synthetic oligonucleotide; note = Description of Combined DNA/RNA Molecule: Synthetic oligonucleotide
  modified_base 1: mod_base = OTHER; note = 2'-O-methyladenosine-3'- phosphorothioate
  modified_base 2: mod_base = OTHER; note = 2'-O-methyladenosine-3'- phosphorothioate
  modified_base 3: mod_base = OTHER; note = 2'-O-methyluridine-3'-phosphorothioate
  modified_base 4: mod_base = OTHER; note = 2'-O-methylguanosine-3'- phosphorothioate
  modified_base 5: mod_base = OTHER; note = 2'-O-methylcytidine-3'- phosphorothioate
  modified_base 6: mod_base = OTHER; note = 2'-deoxyadenosine-3'-phosphorothioate
  modified_base 7: mod_base = OTHER; note = 2'-deoxyadenosine-3'-phosphorothioate
  modified_base 8: mod_base = OTHER; note = 2'-deoxyadenosine-3'-phosphorothioate
  modified_base 9: mod_base = OTHER; note = 2'-deoxyadenosine-3'-phosphorothioate
  modified_base 10: mod_base = OTHER; note = 2'-deoxyadenosine-3'-phosphorothioate
  modified_base 11: mod_base = OTHER; note = 2'-deoxythymidine-3'-phosphorothioate
  modified_base 12: mod_base = OTHER; note = 2'-deoxyguanosine-3'-phosphorothioate
  modified_base 13: mod_base = OTHER; note = 2'-deoxythymidine-3'-phosphorothioate
  modified_base 14: mod_base = OTHER; note = 2'-deoxyadenosine-3'-phosphorothioate
  modified_base 15: mod_base = OTHER; note = 2'-deoxythymidine-3'-phosphorothioate
  modified_base 16: mod_base = OTHER; note = 2'-O-methyladenosine-3'- phosphorothioate
  modified_base 17: mod_base = OTHER; note = 2'-O-methylcytidine-3'- phosphorothioate
  modified_base 18: mod_base = OTHER; note = 2'-O-methyluridine-3'-phosphorothioate
  modified_base 19: mod_base = OTHER; note = 2'-O-methyluridine-3'-phosphorothioate
  modified_base 20: mod_base = OTHER; note = 2'-O-methyluridine-3'-phosphate
  misc_feature 1..5: note = RNA
  misc_feature 6..15: note = DNA
  misc_feature 16..20: note = RNA
aatgcaaaaatgtatacttt

SEQ ID NO: 223 - DNA, 20 bp, synthetic construct
  source 1..20: mol_type = other DNA; note = Description of Artificial Sequence: Synthetic oligonucleotide; note = Description of Combined DNA/RNA Molecule: Synthetic oligonucleotide
  modified_base 1: mod_base = OTHER; note = 2'-O-methyladenosine-3'- phosphorothioate
  modified_base 2: mod_base = OTHER; note = 2'-O-methyladenosine-3'- phosphorothioate
  modified_base 3: mod_base = OTHER; note = 2'-O-methyladenosine-3'- phosphorothioate
  modified_base 4: mod_base = OTHER; note = 2'-O-methylcytidine-3'- phosphorothioate
  modified_base 5: mod_base = OTHER; note = 2'-O-methylcytidine-3'- phosphorothioate
  modified_base 6: mod_base = OTHER; note = 2'-deoxyguanosine-3'-phosphorothioate
  modified_base 7: mod_base = OTHER; note = 2'-deoxyadenosine-3'-phosphorothioate
  modified_base 8: mod_base = OTHER; note = 2'-deoxyadenosine-3'-phosphorothioate
  modified_base 9: mod_base = OTHER; note = 2'-deoxyguanosine-3'-phosphorothioate
  modified_base 10: mod_base = OTHER; note = 2'-deoxyguanosine-3'-phosphorothioate
  modified_base 11: mod_base = OTHER; note = 5'-methyl-deoxycytidine-3'-phosphorothioate
  modified_base 12: mod_base = OTHER; note = 2'-deoxyadenosine-3'-phosphorothioate
  modified_base 13: mod_base = OTHER; note = 2'-deoxyadenosine-3'-phosphorothioate
  modified_base 14: mod_base = OTHER; note = 2'-deoxythymidine-3'-phosphorothioate
  modified_base 15: mod_base = OTHER; note = 2'-deoxyguanosine-3'-phosphorothioate
  modified_base 16: mod_base = OTHER; note = 2'-O-methylcytidine-3'- phosphorothioate
  modified_base 17: mod_base = OTHER; note = 2'-O-methyladenosine-3'- phosphorothioate
  modified_base 18: mod_base = OTHER; note = 2'-O-methyladenosine-3'- phosphorothioate
  modified_base 19: mod_base = OTHER; note = 2'-O-methyladenosine-3'- phosphorothioate
  modified_base 20: mod_base = OTHER; note = 2'-O-methyladenosine-3'-phosphate
  misc_feature 1..5: note = RNA
  misc_feature 6..15: note = DNA
  misc_feature 16..20: note = RNA
aaaccgaaggcaatgcaaaa

SEQ ID NO: 224 - DNA, 20 bp, synthetic construct
  source 1..20: mol_type = other DNA; note = Description of Artificial Sequence: Synthetic oligonucleotide; note = Description of Combined DNA/RNA Molecule: Synthetic oligonucleotide
  modified_base 1: mod_base = OTHER; note = 2'-O-methylguanosine-3'- phosphorothioate
  modified_base 2: mod_base = OTHER; note = 2'-O-methyladenosine-3'- phosphorothioate
  modified_base 3: mod_base = OTHER; note = 2'-O-methylcytidine-3'- phosphorothioate
  modified_base 4: mod_base = OTHER; note = 2'-O-methyladenosine-3'- phosphorothioate
  modified_base 5: mod_base = OTHER; note = 2'-O-methylcytidine-3'- phosphorothioate
  modified_base 6: mod_base = OTHER; note = 2'-deoxythymidine-3'-phosphorothioate
  modified_base 7: mod_base = OTHER; note = 2'-deoxyadenosine-3'-phosphorothioate
  modified_base 8: mod_base = OTHER; note = 2'-deoxyadenosine-3'-phosphorothioate
  modified_base 9: mod_base = OTHER; note = 2'-deoxyadenosine-3'-phosphorothioate
  modified_base 10: mod_base = OTHER; note = 2'-deoxythymidine-3'-phosphorothioate
  modified_base 11: mod_base = OTHER; note = 2'-deoxyadenosine-3'-phosphorothioate
  modified_base 12: mod_base = OTHER; note = 5'-methyl-deoxycytidine-3'-phosphorothioate
  modified_base 13: mod_base = OTHER; note = 2'-deoxyadenosine-3'-phosphorothioate
  modified_base 14: mod_base = OTHER; note = 2'-deoxyadenosine-3'-phosphorothioate
  modified_base 15: mod_base = OTHER; note = 2'-deoxyadenosine-3'-phosphorothioate
  modified_base 16: mod_base = OTHER; note = 2'-O-methylcytidine-3'- phosphorothioate
  modified_base 17: mod_base = OTHER; note = 2'-O-methylcytidine-3'- phosphorothioate
  modified_base 18: mod_base = OTHER; note = 2'-O-methylguanosine-3'- phosphorothioate
  modified_base 19: mod_base = OTHER; note = 2'-O-methyladenosine-3'- phosphorothioate
  modified_base 20: mod_base = OTHER; note = 2'-O-methyladenosine-3'-phosphate
  misc_feature 1..5: note = RNA
  misc_feature 6..15: note = DNA
  misc_feature 16..20: note = RNA
gacactaaatacaaaccgaa

SEQ ID NO: 225 - DNA, 20 bp, synthetic construct
  source 1..20: mol_type = other DNA; note = Description of Artificial Sequence: Synthetic oligonucleotide; note = Description of Combined DNA/RNA Molecule: Synthetic oligonucleotide
  modified_base 1: mod_base = OTHER; note = 2'-O-methylcytidine-3'- phosphorothioate
  modified_base 2: mod_base = OTHER; note = 2'-O-methyluridine-3'-phosphorothioate
  modified_base 3: mod_base = OTHER; note = 2'-O-methyluridine-3'-phosphorothioate
  modified_base 4: mod_base = OTHER; note = 2'-O-methyladenosine-3'- phosphorothioate
  modified_base 5: mod_base = OTHER; note = 2'-O-methylcytidine-3'- phosphorothioate
  modified_base 6: mod_base = OTHER; note = 2'-deoxyadenosine-3'-phosphorothioate
  modified_base 7: mod_base = OTHER; note = 2'-deoxythymidine-3'-phosphorothioate
  modified_base 8: mod_base = OTHER; note = 2'-deoxythymidine-3'-phosphorothioate
  modified_base 9: mod_base = OTHER; note = 5'-methyl-deoxycytidine-3'-phosphorothioate
  modified_base 10: mod_base = OTHER; note = 2'-deoxyadenosine-3'-phosphorothioate
  modified_base 11: mod_base = OTHER; note = 2'-deoxyadenosine-3'-phosphorothioate
  modified_base 12: mod_base = OTHER; note = 2'-deoxyguanosine-3'-phosphorothioate
  modified_base 13: mod_base = OTHER; note = 2'-deoxyadenosine-3'-phosphorothioate
  modified_base 14: mod_base = OTHER; note = 5'-methyl-deoxycytidine-3'-phosphorothioate
  modified_base 15: mod_base = OTHER; note = 2'-deoxyadenosine-3'-phosphorothioate
  modified_base 16: mod_base = OTHER; note = 2'-O-methylcytidine-3'- phosphorothioate
  modified_base 17: mod_base = OTHER; note = 2'-O-methyluridine-3'-phosphorothioate
  modified_base 18: mod_base = OTHER; note = 2'-O-methyladenosine-3'- phosphorothioate
  modified_base 19: mod_base = OTHER; note = 2'-O-methyladenosine-3'- phosphorothioate
  modified_base 20: mod_base = OTHER; note = 2'-O-methyladenosine-3'-phosphate
  misc_feature 1..5: note = RNA
  misc_feature 6..15: note = DNA
  misc_feature 16..20: note = RNA
cttacattcaagacactaaa

SEQ ID NO: 226 - DNA, 20 bp, synthetic construct
  source 1..20: mol_type = other DNA; note = Description of Artificial Sequence: Synthetic oligonucleotide; note = Description of Combined DNA/RNA Molecule: Synthetic oligonucleotide
  modified_base 1: mod_base = OTHER; note = 2'-O-methylguanosine-3'- phosphorothioate
  modified_base 2: mod_base = OTHER; note = 2'-O-methyladenosine-3'- phosphorothioate
  modified_base 3: mod_base = OTHER; note = 2'-O-methylguanosine-3'- phosphorothioate
  modified_base 4: mod_base = OTHER; note = 2'-O-methylguanosine-3'- phosphorothioate
  modified_base 5: mod_base = OTHER; note = 2'-O-methyluridine-3'-phosphorothioate
  modified_base 6: mod_base = OTHER; note = 5'-methyl-deoxycytidine-3'-phosphorothioate
  modified_base 7: mod_base = OTHER; note = 2'-deoxyadenosine-3'-phosphorothioate
  modified_base 8: mod_base = OTHER; note = 2'-deoxythymidine-3'-phosphorothioate
  modified_base 9: mod_base = OTHER; note = 2'-deoxyguanosine-3'-phosphorothioate
  modified_base 10: mod_base = OTHER; note = 2'-deoxythymidine-3'-phosphorothioate
  modified_base 11: mod_base = OTHER; note = 2'-deoxythymidine-3'-phosphorothioate
  modified_base 12: mod_base = OTHER; note = 5'-methyl-deoxycytidine-3'-phosphorothioate
  modified_base 13: mod_base = OTHER; note = 2'-deoxythymidine-3'-phosphorothioate
  modified_base 14: mod_base = OTHER; note = 2'-deoxythymidine-3'-phosphorothioate
  modified_base 15: mod_base = OTHER; note = 2'-deoxyadenosine-3'-phosphorothioate
  modified_base 16: mod_base = OTHER; note = 2'-O-methylcytidine-3'- phosphorothioate
  modified_base 17: mod_base = OTHER; note = 2'-O-methyladenosine-3'- phosphorothioate
  modified_base 18: mod_base = OTHER; note = 2'-O-methyluridine-3'-phosphorothioate
  modified_base 19: mod_base = OTHER; note = 2'-O-methyluridine-3'-phosphorothioate
  modified_base 20: mod_base = OTHER; note = 2'-O-methylcytidine-3'-phosphate
  misc_feature 1..5: note = RNA
  misc_feature 6..15: note = DNA
  misc_feature 16..20: note = RNA
gaggtcatgttcttacattc

SEQ ID NO: 227 - DNA, 20 bp, synthetic construct
  source 1..20: mol_type = other DNA; note = Description of Artificial Sequence: Synthetic oligonucleotide; note = Description of Combined DNA/RNA Molecule: Synthetic oligonucleotide
  modified_base 1: mod_base = OTHER; note = 2'-O-methylcytidine-3'- phosphorothioate
  modified_base 2: mod_base = OTHER; note = 2'-O-methyladenosine-3'- phosphorothioate
  modified_base 3: mod_base = OTHER; note = 2'-O-methylcytidine-3'- phosphorothioate
  modified_base 4: mod_base = OTHER; note = 2'-O-methyluridine-3'-phosphorothioate
  modified_base 5: mod_base = OTHER; note = 2'-O-methyladenosine-3'- phosphorothioate
  modified_base 6: mod_base = OTHER; note = 5'-methyl-deoxycytidine-3'-phosphorothioate
  modified_base 7: mod_base = OTHER; note = 2'-deoxyadenosine-3'-phosphorothioate
  modified_base 8: mod_base = OTHER; note = 5'-methyl-deoxycytidine-3'-phosphorothioate
  modified_base 9: mod_base = OTHER; note = 2'-deoxyguanosine-3'-phosphorothioate
  modified_base 10: mod_base = OTHER; note = 2'-deoxyguanosine-3'-phosphorothioate
  modified_base 11: mod_base = OTHER; note = 2'-deoxyadenosine-3'-phosphorothioate
  modified_base 12: mod_base = OTHER; note = 2'-deoxyguanosine-3'-phosphorothioate
  modified_base 13: mod_base = OTHER; note = 2'-deoxyguanosine-3'-phosphorothioate
  modified_base 14: mod_base = OTHER; note = 2'-deoxythymidine-3'-phosphorothioate
  modified_base 15: mod_base = OTHER; note = 5'-methyl-deoxycytidine-3'-phosphorothioate
  modified_base 16: mod_base = OTHER; note = 2'-O-methyladenosine-3'- phosphorothioate
  modified_base 17: mod_base = OTHER; note = 2'-O-methyluridine-3'-phosphorothioate
  modified_base 18: mod_base = OTHER; note = 2'-O-methylguanosine-3'- phosphorothioate
  modified_base 19: mod_base = OTHER; note = 2'-O-methyluridine-3'-phosphorothioate
  modified_base 20: mod_base = OTHER; note = 2'-O-methyluridine-3'-phosphate
  misc_feature 1..5: note = RNA
  misc_feature 6..15: note = DNA
  misc_feature 16..20: note = RNA
cactacacggaggtcatgtt

SEQ ID NO: 228 - DNA, 20 bp, synthetic construct
  source 1..20: mol_type = other DNA; note = Description of Artificial Sequence: Synthetic oligonucleotide; note = Description of Combined DNA/RNA Molecule: Synthetic oligonucleotide
  modified_base 1: mod_base = OTHER; note = 2'-O-methyladenosine-3'- phosphorothioate
  modified_base 2: mod_base = OTHER; note = 2'-O-methyladenosine-3'- phosphorothioate
  modified_base 3: mod_base = OTHER; note = 2'-O-methylguanosine-3'- phosphorothioate
  modified_base 4: mod_base = OTHER; note = 2'-O-methylguanosine-3'- phosphorothioate
  modified_base 5: mod_base = OTHER; note = 2'-O-methyluridine-3'-phosphorothioate
  modified_base 6: mod_base = OTHER; note = 2'-deoxyadenosine-3'-phosphorothioate
  modified_base 7: mod_base = OTHER; note = 2'-deoxythymidine-3'-phosphorothioate
  modified_base 8: mod_base = OTHER; note = 2'-deoxythymidine-3'-phosphorothioate
  modified_base 9: mod_base = OTHER; note = 2'-deoxyadenosine-3'-phosphorothioate
  modified_base 10: mod_base = OTHER; note = 5'-methyl-deoxycytidine-3'-phosphorothioate
  modified_base 11: mod_base = OTHER; note = 2'-deoxyadenosine-3'-phosphorothioate
  modified_base 12: mod_base = OTHER; note = 2'-deoxyguanosine-3'-phosphorothioate
  modified_base 13: mod_base = OTHER; note = 2'-deoxyadenosine-3'-phosphorothioate
  modified_base 14: mod_base = OTHER; note = 5'-methyl-deoxycytidine-3'-phosphorothioate
  modified_base 15: mod_base = OTHER; note = 2'-deoxyadenosine-3'-phosphorothioate
  modified_base 16: mod_base = OTHER; note = 2'-O-methylcytidine-3'- phosphorothioate
  modified_base 17: mod_base = OTHER; note = 2'-O-methyluridine-3'-phosphorothioate
  modified_base 18: mod_base = OTHER; note = 2'-O-methyladenosine-3'- phosphorothioate
  modified_base 19: mod_base = OTHER; note = 2'-O-methylcytidine-3'- phosphorothioate
  modified_base 20: mod_base = OTHER; note = 2'-O-methyladenosine-3'-phosphate
  misc_feature 1..5: note = RNA
  misc_feature 6..15: note = DNA
  misc_feature 16..20: note = RNA
aaggtattacagacactaca

SEQ ID NO: 229 - DNA, 20 bp, synthetic construct
  source 1..20: mol_type = other DNA; note = Description of Artificial Sequence: Synthetic oligonucleotide; note = Description of Combined DNA/RNA Molecule: Synthetic oligonucleotide
  modified_base 1: mod_base = OTHER; note = 2'-O-methylguanosine-3'- phosphorothioate
  modified_base 2: mod_base = OTHER; note = 2'-O-methyladenosine-3'- phosphorothioate
  modified_base 3: mod_base = OTHER; note = 2'-O-methyladenosine-3'- phosphorothioate
  modified_base 4: mod_base = OTHER; note = 2'-O-methyladenosine-3'- phosphorothioate
  modified_base 5: mod_base = OTHER; note = 2'-O-methyladenosine-3'- phosphorothioate
  modified_base 6: mod_base = OTHER; note = 2'-deoxyadenosine-3'-phosphorothioate
  modified_base 7: mod_base = OTHER; note = 2'-deoxyadenosine-3'-phosphorothioate
  modified_base 8: mod_base = OTHER; note = 5'-methyl-deoxycytidine-3'-phosphorothioate
  modified_base 9: mod_base = OTHER; note = 2'-deoxythymidine-3'-phosphorothioate
  modified_base 10: mod_base = OTHER; note = 2'-deoxyadenosine-3'-phosphorothioate
  modified_base 11: mod_base = OTHER; note = 2'-deoxyadenosine-3'-phosphorothioate
  modified_base 12: mod_base = OTHER; note = 2'-deoxyguanosine-3'-phosphorothioate
  modified_base 13: mod_base = OTHER; note = 2'-deoxyguanosine-3'-phosphorothioate
  modified_base 14: mod_base = OTHER; note = 2'-deoxythymidine-3'-phosphorothioate
  modified_base 15: mod_base = OTHER; note = 2'-deoxyadenosine-3'-phosphorothioate
  modified_base 16: mod_base = OTHER; note = 2'-O-methyluridine-3'-phosphorothioate
  modified_base 17: mod_base = OTHER; note = 2'-O-methyluridine-3'-phosphorothioate
  modified_base 18: mod_base = OTHER; note = 2'-O-methyladenosine-3'- phosphorothioate
  modified_base 19: mod_base = OTHER; note = 2'-O-methylcytidine-3'- phosphorothioate
  modified_base 20: mod_base = OTHER; note = 2'-O-methyladenosine-3'-phosphate
  misc_feature 1..5: note = RNA
  misc_feature 6..15: note = DNA
  misc_feature 16..20: note = RNA
gaaaaaactaaggtattaca

SEQ ID NO: 230 - DNA, 20 bp, synthetic construct
  source 1..20: mol_type = other DNA; note = Description of Artificial Sequence: Synthetic oligonucleotide; note = Description of Combined DNA/RNA Molecule: Synthetic oligonucleotide
  modified_base 1: mod_base = OTHER; note = 2'-O-methyladenosine-3'- phosphorothioate
  modified_base 2: mod_base = OTHER; note = 2'-O-methylcytidine-3'- phosphorothioate
  modified_base 3: mod_base = OTHER; note = 2'-O-methyladenosine-3'- phosphorothioate
  modified_base 4: mod_base = OTHER; note = 2'-O-methyladenosine-3'- phosphorothioate
  modified_base 5: mod_base = OTHER; note = 2'-O-methylguanosine-3'- phosphorothioate
  modified_base 6: mod_base = OTHER; note = 5'-methyl-deoxycytidine-3'-phosphorothioate
  modified_base 7: mod_base = OTHER; note = 2'-deoxyadenosine-3'-phosphorothioate
  modified_base 8: mod_base = OTHER; note = 2'-deoxythymidine-3'-phosphorothioate
  modified_base 9: mod_base = OTHER; note = 5'-methyl-deoxycytidine-3'-phosphorothioate
  modified_base 10: mod_base = OTHER; note = 2'-deoxythymidine-3'-phosphorothioate
  modified_base 11: mod_base = OTHER; note = 2'-deoxyguanosine-3'-phosphorothioate
  modified_base 12: mod_base = OTHER; note = 2'-deoxythymidine-3'-phosphorothioate
  modified_base 13: mod_base = OTHER; note = 2'-deoxyguanosine-3'-phosphorothioate
  modified_base 14: mod_base = OTHER; note = 2'-deoxyguanosine-3'-phosphorothioate
  modified_base 15: mod_base = OTHER; note = 2'-deoxyadenosine-3'-phosphorothioate
  modified_base 16: mod_base = OTHER; note = 2'-O-methyladenosine-3'- phosphorothioate
  modified_base 17: mod_base = OTHER; note = 2'-O-methyladenosine-3'- phosphorothioate
  modified_base 18: mod_base = OTHER; note = 2'-O-methyladenosine-3'- phosphorothioate
  modified_base 19: mod_base = OTHER; note = 2'-O-methyladenosine-3'- phosphorothioate
  modified_base 20: mod_base = OTHER; note = 2'-O-methyladenosine-3'-phosphate
  misc_feature 1..5: note = RNA
  misc_feature 6..15: note = DNA
  misc_feature 16..20: note = RNA
acaagcatctgtggaaaaaa

SEQ ID NO: 231 - DNA, 20 bp, synthetic construct
  source 1..20: mol_type = other DNA; note = Description of Artificial Sequence: Synthetic oligonucleotide; note = Description of Combined DNA/RNA Molecule: Synthetic oligonucleotide
  modified_base 1: mod_base = OTHER; note = 2'-O-methyluridine-3'-phosphorothioate
  modified_base 2: mod_base = OTHER; note = 2'-O-methylcytidine-3'- phosphorothioate
  modified_base 3: mod_base = OTHER; note = 2'-O-methyladenosine-3'- phosphorothioate
  modified_base 4: mod_base = OTHER; note = 2'-O-methyladenosine-3'- phosphorothioate
  modified_base 5: mod_base = OTHER; note = 2'-O-methyladenosine-3'- phosphorothioate
  modified_base 6: mod_base = OTHER; note = 2'-deoxyadenosine-3'-phosphorothioate
  modified_base 7: mod_base = OTHER; note = 2'-deoxyadenosine-3'-phosphorothioate
  modified_base 8: mod_base = OTHER; note = 2'-deoxythymidine-3'-phosphorothioate
  modified_base 9: mod_base = OTHER; note = 5'-methyl-deoxycytidine-3'-phosphorothioate
  modified_base 10: mod_base = OTHER; note = 2'-deoxyadenosine-3'-phosphorothioate
  modified_base 11: mod_base = OTHER; note = 5'-methyl-deoxycytidine-3'-phosphorothioate
  modified_base 12: mod_base = OTHER; note = 2'-deoxyadenosine-3'-phosphorothioate
  modified_base 13: mod_base = OTHER; note = 2'-deoxyadenosine-3'-phosphorothioate
  modified_base 14: mod_base = OTHER; note = 2'-deoxyguanosine-3'-phosphorothioate
  modified_base 15: mod_base = OTHER; note = 5'-methyl-deoxycytidine-3'-phosphorothioate
  modified_base 16: mod_base = OTHER; note = 2'-O-methyladenosine-3'- phosphorothioate
  modified_base 17: mod_base = OTHER; note = 2'-O-methyluridine-3'-phosphorothioate
  modified_base 18: mod_base = OTHER; note = 2'-O-methylcytidine-3'- phosphorothioate
  modified_base 19: mod_base = OTHER; note = 2'-O-methyluridine-3'-phosphorothioate
  modified_base 20: mod_base = OTHER; note = 2'-O-methylguanosine-3'-phosphate
  misc_feature 1..5: note = RNA
  misc_feature 6..15: note = DNA
  misc_feature 16..20: note = RNA
tcaaaaatcacaagcatctg

SEQ ID NO: 232 - DNA, 20 bp, synthetic construct
  source 1..20: mol_type = other DNA; note = Description of Artificial Sequence: Synthetic oligonucleotide; note = Description of Combined DNA/RNA Molecule: Synthetic oligonucleotide
  modified_base 1: mod_base = OTHER; note = 2'-O-methyluridine-3'-phosphorothioate
  modified_base 2: mod_base = OTHER; note = 2'-O-methyluridine-3'-phosphorothioate
  modified_base 3: mod_base = OTHER; note = 2'-O-methyluridine-3'-phosphorothioate
  modified_base 4: mod_base = OTHER; note = 2'-O-methylcytidine-3'- phosphorothioate
  modified_base 5: mod_base = OTHER; note = 2'-O-methyladenosine-3'- phosphorothioate
  modified_base 6: mod_base = OTHER; note = 5'-methyl-deoxycytidine-3'-phosphorothioate
  modified_base 7: mod_base = OTHER; note = 2'-deoxyguanosine-3'-phosphorothioate
  modified_base 8: mod_base = OTHER; note = 2'-deoxythymidine-3'-phosphorothioate
  modified_base 9: mod_base = OTHER; note = 2'-deoxyadenosine-3'-phosphorothioate
  modified_base 10: mod_base = OTHER; note = 2'-deoxythymidine-3'-phosphorothioate
  modified_base 11: mod_base = OTHER; note = 2'-deoxythymidine-3'-phosphorothioate
  modified_base 12: mod_base = OTHER; note = 2'-deoxyguanosine-3'-phosphorothioate
  modified_base 13: mod_base = OTHER; note = 2'-deoxythymidine-3'-phosphorothioate
  modified_base 14: mod_base = OTHER; note = 2'-deoxythymidine-3'-phosphorothioate
  modified_base 15: mod_base = OTHER; note = 5'-methyl-deoxycytidine-3'-phosphorothioate
  modified_base 16: mod_base = OTHER; note = 2'-O-methyladenosine-3'- phosphorothioate
  modified_base 17: mod_base = OTHER; note = 2'-O-methyladenosine-3'- phosphorothioate
  modified_base 18: mod_base = OTHER; note = 2'-O-methyladenosine-3'- phosphorothioate
  modified_base 19: mod_base = OTHER; note = 2'-O-methyladenosine-3'- phosphorothioate
  modified_base 20: mod_base = OTHER; note = 2'-O-methyladenosine-3'-phosphate
  misc_feature 1..5: note = RNA
  misc_feature 6..15: note = DNA
  misc_feature 16..20: note = RNA
tttcacgtattgttcaaaaa

SEQ ID NO: 233 - DNA, 20 bp, synthetic construct
  source 1..20: mol_type = other DNA; note = Description of Artificial Sequence: Synthetic oligonucleotide; note = Description of Combined DNA/RNA Molecule: Synthetic oligonucleotide
  modified_base 1: mod_base = OTHER; note = 2'-O-methylguanosine-3'- phosphorothioate
  modified_base 2: mod_base = OTHER; note = 2'-O-methyluridine-3'-phosphorothioate
  modified_base 3: mod_base = OTHER; note = 2'-O-methylguanosine-3'- phosphorothioate
  modified_base 4: mod_base = OTHER; note = 2'-O-methylcytidine-3'- phosphorothioate
  modified_base 5: mod_base = OTHER; note = 2'-O-methyluridine-3'-phosphorothioate
  modified_base 6: mod_base = OTHER; note = 2'-deoxythymidine-3'-phosphorothioate
  modified_base 7: mod_base = OTHER; note = 2'-deoxyguanosine-3'-phosphorothioate
  modified_base 8: mod_base = OTHER; note = 5'-methyl-deoxycytidine-3'-phosphorothioate
  modified_base 9: mod_base = OTHER; note = 2'-deoxyadenosine-3'-phosphorothioate
  modified_base 10: mod_base = OTHER; note = 2'-deoxythymidine-3'-phosphorothioate
  modified_base 11: mod_base = OTHER; note = 5'-methyl-deoxycytidine-3'-phosphorothioate
  modified_base 12: mod_base = OTHER; note = 2'-deoxythymidine-3'-phosphorothioate
  modified_base 13: mod_base = OTHER; note = 2'-deoxythymidine-3'-phosphorothioate
  modified_base 14: mod_base = OTHER; note = 2'-deoxythymidine-3'-phosphorothioate
  modified_base 15: mod_base = OTHER; note = 5'-methyl-deoxycytidine-3'-phosphorothioate
  modified_base 16: mod_base = OTHER; note = 2'-O-methyladenosine-3'- phosphorothioate
  modified_base 17: mod_base = OTHER; note = 2'-O-methylcytidine-3'- phosphorothioate
  modified_base 18: mod_base = OTHER; note = 2'-O-methylguanosine-3'- phosphorothioate
  modified_base 19: mod_base = OTHER; note = 2'-O-methyluridine-3'-phosphorothioate
  modified_base 20: mod_base = OTHER; note = 2'-O-methyladenosine-3'-phosphate
  misc_feature 1..5: note = RNA
  misc_feature 6..15: note = DNA
  misc_feature 16..20: note = RNA
gtgcttgcatctttcacgta

SEQ ID NO: 234 - DNA, 20 bp, synthetic construct
  source 1..20: mol_type = other DNA; note = Description of Artificial Sequence: Synthetic oligonucleotide; note = Description of Combined DNA/RNA Molecule: Synthetic oligonucleotide
  modified_base 1: mod_base = OTHER; note = 2'-O-methylcytidine-3'- phosphorothioate
  modified_base 2: mod_base = OTHER; note = 2'-O-methyladenosine-3'- phosphorothioate
  modified_base 3: mod_base = OTHER; note = 2'-O-methylguanosine-3'- phosphorothioate
  modified_base 4: mod_base = OTHER; note = 2'-O-methyladenosine-3'- phosphorothioate
  modified_base 5: mod_base = OTHER; note = 2'-O-methyladenosine-3'- phosphorothioate
  modified_base 6: mod_base = OTHER; note = 2'-deoxyadenosine-3'-phosphorothioate
  modified_base 7: mod_base = OTHER; note = 2'-deoxythymidine-3'-phosphorothioate
  modified_base 8: mod_base = OTHER; note = 2'-deoxythymidine-3'-phosphorothioate
  modified_base 9: mod_base = OTHER; note = 5'-methyl-deoxycytidine-3'-phosphorothioate
  modified_base 10: mod_base = OTHER; note = 2'-deoxyadenosine-3'-phosphorothioate
  modified_base 11: mod_base = OTHER; note = 2'-deoxyguanosine-3'-phosphorothioate
  modified_base 12: mod_base = OTHER; note = 2'-deoxyguanosine-3'-phosphorothioate
  modified_base 13: mod_base = OTHER; note = 2'-deoxythymidine-3'-phosphorothioate
  modified_base 14: mod_base = OTHER; note = 2'-deoxyguanosine-3'-phosphorothioate
  modified_base 15: mod_base = OTHER; note = 5'-methyl-deoxycytidine-3'-phosphorothioate
  modified_base 16: mod_base = OTHER; note = 2'-O-methyluridine-3'-phosphorothioate
  modified_base 17: mod_base = OTHER; note = 2'-O-methyluridine-3'-phosphorothioate
  modified_base 18: mod_base = OTHER; note = 2'-O-methylguanosine-3'- phosphorothioate
  modified_base 19: mod_base = OTHER; note = 2'-O-methylcytidine-3'- phosphorothioate
  modified_base 20: mod_base = OTHER; note = 2'-O-methyladenosine-3'-phosphate
  misc_feature 1..5: note = RNA
  misc_feature 6..15: note = DNA
  misc_feature 16..20: note = RNA
cagaaattcaggtgcttgca

SEQ ID NO: 235 - DNA, 20 bp, synthetic construct
  source 1..20: mol_type = other DNA; note = Description of Artificial Sequence: Synthetic oligonucleotide; note = Description of Combined DNA/RNA Molecule: Synthetic oligonucleotide
  modified_base 1: mod_base = OTHER; note = 2'-O-methylcytidine-3'- phosphorothioate
  modified_base 2: mod_base = OTHER; note = 2'-O-methylcytidine-3'- phosphorothioate
  modified_base 3: mod_base = OTHER; note = 2'-O-methylguanosine-3'- phosphorothioate
  modified_base 4: mod_base = OTHER; note = 2'-O-methylcytidine-3'- phosphorothioate
  modified_base 5: mod_base = OTHER; note = 2'-O-methyladenosine-3'- phosphorothioate
  modified_base 6: mod_base = OTHER; note = 2'-deoxythymidine-3'-phosphorothioate
  modified_base 7: mod_base = OTHER; note = 2'-deoxythymidine-3'-phosphorothioate
  modified_base 8: mod_base = OTHER; note = 5'-methyl-deoxycytidine-3'-phosphorothioate
  modified_base 9: mod_base = OTHER; note = 2'-deoxyadenosine-3'-phosphorothioate
  modified_base 10: mod_base = OTHER; note = 2'-deoxyadenosine-3'-phosphorothioate
  modified_base 11: mod_base = OTHER; note = 2'-deoxyadenosine-3'-phosphorothioate
  modified_base 12: mod_base = OTHER; note = 5'-methyl-deoxycytidine-3'-phosphorothioate
  modified_base 13: mod_base = OTHER; note = 2'-deoxyadenosine-3'-phosphorothioate
  modified_base 14: mod_base = OTHER; note = 2'-deoxyguanosine-3'-phosphorothioate
  modified_base 15: mod_base = OTHER; note = 2'-deoxyadenosine-3'-phosphorothioate
  modified_base 16: mod_base = OTHER; note = 2'-O-methyladenosine-3'- phosphorothioate
  modified_base 17: mod_base = OTHER; note = 2'-O-methyladenosine-3'- phosphorothioate
  modified_base 18: mod_base = OTHER; note = 2'-O-methyluridine-3'-phosphorothioate
  modified_base 19: mod_base = OTHER; note = 2'-O-methyluridine-3'-phosphorothioate
  modified_base 20: mod_base = OTHER; note = 2'-O-methylcytidine-3'-phosphate
  misc_feature 1..5: note = RNA
  misc_feature 6..15: note = DNA
  misc_feature 16..20: note = RNA
ccgcattcaaacagaaattc

SEQ ID NO: 236 - DNA, 20 bp, synthetic construct
  source 1..20: mol_type = other DNA; note = Description of Artificial Sequence: Synthetic oligonucleotide; note = Description of Combined DNA/RNA Molecule: Synthetic oligonucleotide
  modified_base 1: mod_base = OTHER; note = 2'-O-methylguanosine-3'- phosphorothioate
  modified_base 2: mod_base = OTHER; note = 2'-O-methylcytidine-3'- phosphorothioate
  modified_base 3: mod_base = OTHER; note = 2'-O-methyluridine-3'-phosphorothioate
  modified_base 4: mod_base = OTHER; note = 2'-O-methyladenosine-3'- phosphorothioate
  modified_base 5: mod_base = OTHER; note = 2'-O-methyluridine-3'-phosphorothioate
  modified_base 6: mod_base = OTHER; note = 2'-deoxyguanosine-3'-phosphorothioate
  modified_base 7: mod_base = OTHER; note = 2'-deoxyguanosine-3'-phosphorothioate
  modified_base 8: mod_base = OTHER; note = 2'-deoxythymidine-3'-phosphorothioate
  modified_base 9: mod_base = OTHER; note = 2'-deoxythymidine-3'-phosphorothioate
  modified_base 10: mod_base = OTHER; note = 5'-methyl-deoxycytidine-3'-phosphorothioate
  modified_base 11: mod_base = OTHER; note = 5'-methyl-deoxycytidine-3'-phosphorothioate
  modified_base 12: mod_base = OTHER; note = 2'-deoxyguanosine-3'-phosphorothioate
  modified_base 13: mod_base = OTHER; note = 5'-methyl-deoxycytidine-3'-phosphorothioate
  modified_base 14: mod_base = OTHER; note = 2'-deoxyadenosine-3'-phosphorothioate
  modified_base 15: mod_base = OTHER; note = 2'-deoxythymidine-3'-phosphorothioate
  modified_base 16: mod_base = OTHER; note = 2'-O-methyluridine-3'-phosphorothioate
  modified_base 17: mod_base = OTHER; note = 2'-O-methylcytidine-3'- phosphorothioate
  modified_base 18: mod_base = OTHER; note = 2'-O-methyladenosine-3'- phosphorothioate
  modified_base 19: mod_base = OTHER; note = 2'-O-methyladenosine-3'- phosphorothioate
  modified_base 20: mod_base = OTHER; note = 2'-O-methyladenosine-3'-phosphate
  misc_feature 1..5: note = RNA
  misc_feature 6..15: note = DNA
  misc_feature 16..20: note = RNA
gctatggttccgcattcaaa

SEQ ID NO: 237 - DNA, 20 bp, synthetic construct
  source 1..20: mol_type = other DNA; note = Description of Artificial Sequence: Synthetic oligonucleotide; note = Description of Combined DNA/RNA Molecule: Synthetic oligonucleotide
  modified_base 1: mod_base = OTHER; note = 2'-O-methylguanosine-3'- phosphorothioate
  modified_base 2: mod_base = OTHER; note = 2'-O-methyladenosine-3'- phosphorothioate
  modified_base 3: mod_base = OTHER; note = 2'-O-methylguanosine-3'- phosphorothioate
  modified_base 4: mod_base = OTHER; note = 2'-O-methyladenosine-3'- phosphorothioate
  modified_base 5: mod_base = OTHER; note = 2'-O-methyladenosine-3'- phosphorothioate
  modified_base 6: mod_base = OTHER; note = 2'-deoxyadenosine-3'-phosphorothioate
  modified_base 7: mod_base = OTHER; note = 2'-deoxythymidine-3'-phosphorothioate
  modified_base 8: mod_base = OTHER; note = 2'-deoxyadenosine-3'-phosphorothioate
  modified_base 9: mod_base = OTHER; note = 2'-deoxyadenosine-3'-phosphorothioate
  modified_base 10: mod_base = OTHER; note = 5'-methyl-deoxycytidine-3'-phosphorothioate
  modified_base 11: mod_base = OTHER; note = 5'-methyl-deoxycytidine-3'-phosphorothioate
  modified_base 12: mod_base = OTHER; note = 2'-deoxyadenosine-3'-phosphorothioate
  modified_base 13: mod_base = OTHER; note = 2'-deoxyguanosine-3'-phosphorothioate
  modified_base 14: mod_base = OTHER; note = 5'-methyl-deoxycytidine-3'-phosphorothioate
  modified_base 15: mod_base = OTHER; note = 2'-deoxythymidine-3'-phosphorothioate
  modified_base 16: mod_base = OTHER; note = 2'-O-methyladenosine-3'- phosphorothioate
  modified_base 17: mod_base = OTHER; note = 2'-O-methyluridine-3'-phosphorothioate
  modified_base 18: mod_base = OTHER; note = 2'-O-methylguanosine-3'- phosphorothioate
  modified_base 19: mod_base = OTHER; note = 2'-O-methylguanosine-3'- phosphorothioate
  modified_base 20: mod_base = OTHER; note = 2'-O-methyluridine-3'-phosphate
  misc_feature 1..5: note = RNA
  misc_feature 6..15: note = DNA
  misc_feature 16..20: note = RNA
gagaaataaccagctatggt

SEQ ID NO: 238 - DNA, 20 bp, synthetic construct
  source 1..20: mol_type = other DNA; note = Description of Artificial Sequence: Synthetic oligonucleotide; note = Description of Combined DNA/RNA Molecule: Synthetic oligonucleotide
  modified_base 1: mod_base = OTHER; note = 2'-O-methylcytidine-3'- phosphorothioate
  modified_base 2: mod_base = OTHER; note = 2'-O-methyluridine-3'-phosphorothioate
  modified_base 3: mod_base = OTHER; note = 2'-O-methyladenosine-3'- phosphorothioate
  modified_base 4: mod_base = OTHER; note = 2'-O-methyladenosine-3'- phosphorothioate
  modified_base 5: mod_base = OTHER; note = 2'-O-methylcytidine-3'- phosphorothioate
  modified_base 6: mod_base = OTHER; note = 2'-deoxyadenosine-3'-phosphorothioate
  modified_base 7: mod_base = OTHER; note = 5'-methyl-deoxycytidine-3'-phosphorothioate
  modified_base 8: mod_base = OTHER; note = 2'-deoxyadenosine-3'-phosphorothioate
  modified_base 9: mod_base = OTHER; note = 2'-deoxyadenosine-3'-phosphorothioate
  modified_base 10: mod_base = OTHER; note = 2'-deoxyguanosine-3'-phosphorothioate
  modified_base 11: mod_base = OTHER; note = 2'-deoxyguanosine-3'-phosphorothioate
  modified_base 12: mod_base = OTHER; note = 2'-deoxyguanosine-3'-phosphorothioate
  modified_base 13: mod_base = OTHER; note = 2'-deoxyadenosine-3'-phosphorothioate
  modified_base 14: mod_base = OTHER; note = 2'-deoxyguanosine-3'-phosphorothioate
  modified_base 15: mod_base = OTHER; note = 2'-deoxyadenosine-3'-phosphorothioate
  modified_base 16: mod_base = OTHER; note = 2'-O-methyladenosine-3'- phosphorothioate
  modified_base 17: mod_base = OTHER; note = 2'-O-methyladenosine-3'- phosphorothioate
  modified_base 18: mod_base = OTHER; note = 2'-O-methyluridine-3'-phosphorothioate
  modified_base 19: mod_base = OTHER; note = 2'-O-methyladenosine-3'- phosphorothioate
  modified_base 20: mod_base = OTHER; note = 2'-O-methyladenosine-3'-phosphate
  misc_feature 1..5: note = RNA
  misc_feature 6..15: note = DNA
  misc_feature 16..20: note = RNA
ctaacacaagggagaaataa

SEQ ID NO: 239 - DNA, 20 bp, synthetic construct
  source 1..20: mol_type = other DNA; note = Description of Artificial Sequence: Synthetic oligonucleotide; note = Description of Combined DNA/RNA Molecule: Synthetic oligonucleotide
  modified_base 1: mod_base = OTHER; note = 2'-O-methylguanosine-3'- phosphorothioate
  modified_base 2: mod_base = OTHER; note = 2'-O-methyladenosine-3'- phosphorothioate
  modified_base 3: mod_base = OTHER; note = 2'-O-methylcytidine-3'- phosphorothioate
  modified_base 4: mod_base = OTHER; note = 2'-O-methylguanosine-3'- phosphorothioate
  modified_base 5: mod_base = OTHER; note = 2'-O-methyluridine-3'-phosphorothioate
  modified_base 6: mod_base = OTHER; note = 2'-deoxythymidine-3'-phosphorothioate
  modified_base 7: mod_base = OTHER; note = 2'-deoxythymidine-3'-phosphorothioate
  modified_base 8: mod_base = OTHER; note = 2'-deoxyadenosine-3'-phosphorothioate
  modified_base 9: mod_base = OTHER; note = 2'-deoxythymidine-3'-phosphorothioate
  modified_base 10: mod_base = OTHER; note = 2'-deoxythymidine-3'-phosphorothioate
  modified_base 11: mod_base = OTHER; note = 2'-deoxyadenosine-3'-phosphorothioate
  modified_base 12: mod_base = OTHER; note = 5'-methyl-deoxycytidine-3'-phosphorothioate
  modified_base 13: mod_base = OTHER; note = 2'-deoxythymidine-3'-phosphorothioate
  modified_base 14: mod_base = OTHER; note = 2'-deoxyadenosine-3'-phosphorothioate
  modified_base 15: mod_base = OTHER; note = 2'-deoxyadenosine-3'-phosphorothioate
  modified_base 16: mod_base = OTHER; note = 2'-O-methylcytidine-3'- phosphorothioate
  modified_base 17: mod_base = OTHER; note = 2'-O-methyladenosine-3'- phosphorothioate
  modified_base 18: mod_base = OTHER; note = 2'-O-methylcytidine-3'- phosphorothioate
  modified_base 19: mod_base = OTHER; note = 2'-O-methyladenosine-3'- phosphorothioate
  modified_base 20: mod_base = OTHER; note = 2'-O-methyladenosine-3'-phosphate
  misc_feature 1..5: note = RNA
  misc_feature 6..15: note = DNA
  misc_feature 16..20: note = RNA
gacgtttattactaacacaa

SEQ ID NO: 240 - DNA, 20 bp, synthetic construct
  source 1..20: mol_type = other DNA; note = Description of Artificial Sequence: Synthetic oligonucleotide; note = Description of Combined DNA/RNA Molecule: Synthetic oligonucleotide
  modified_base 1: mod_base = OTHER; note = 2'-O-methyluridine-3'-phosphorothioate
  modified_base 2: mod_base = OTHER; note = 2'-O-methyladenosine-3'- phosphorothioate
  modified_base 3: mod_base = OTHER; note = 2'-O-methyluridine-3'-phosphorothioate
  modified_base 4: mod_base = OTHER; note = 2'-O-methyluridine-3'-phosphorothioate
  modified_base 5: mod_base = OTHER; note = 2'-O-methylguanosine-3'- phosphorothioate
  modified_base 6: mod_base = OTHER; note = 2'-deoxythymidine-3'-phosphorothioate
  modified_base 7: mod_base = OTHER; note = 2'-deoxyguanosine-3'-phosphorothioate
  modified_base 8: mod_base = OTHER; note = 2'-deoxyguanosine-3'-phosphorothioate
  modified_base 9: mod_base = OTHER; note = 5'-methyl-deoxycytidine-3'-phosphorothioate
  modified_base 10: mod_base = OTHER; note = 2'-deoxyadenosine-3'-phosphorothioate
  modified_base 11: mod_base = OTHER; note = 2'-deoxyadenosine-3'-phosphorothioate
  modified_base 12: mod_base = OTHER; note = 2'-deoxyguanosine-3'-phosphorothioate
  modified_base 13: mod_base = OTHER; note = 2'-deoxyadenosine-3'-phosphorothioate
  modified_base 14: mod_base = OTHER; note = 5'-methyl-deoxycytidine-3'-phosphorothioate
  modified_base 15: mod_base = OTHER; note = 2'-deoxyguanosine-3'-phosphorothioate
  modified_base 16: mod_base = OTHER; note = 2'-O-methyluridine-3'-phosphorothioate
  modified_base 17: mod_base = OTHER; note = 2'-O-methyluridine-3'-phosphorothioate
  modified_base 18: mod_base = OTHER; note = 2'-O-methyluridine-3'-phosphorothioate
  modified_base 19: mod_base = OTHER; note = 2'-O-methyladenosine-3'- phosphorothioate
  modified_base 20: mod_base = OTHER; note = 2'-O-methyluridine-3'-phosphate
  misc_feature 1..5: note = RNA
  misc_feature 6..15: note = DNA
  misc_feature 16..20: note = RNA
tattgtggcaagacgtttat

SEQ ID NO: 241 - DNA, 20 bp, synthetic construct
  source 1..20: mol_type = other DNA; note = Description of Artificial Sequence: Synthetic oligonucleotide; note = Description of Combined DNA/RNA Molecule: Synthetic oligonucleotide
  modified_base 1: mod_base = OTHER; note = 2'-O-methyluridine-3'-phosphorothioate
  modified_base 2: mod_base = OTHER; note = 2'-O-methyluridine-3'-phosphorothioate
  modified_base 3: mod_base = OTHER; note = 2'-O-methyluridine-3'-phosphorothioate
  modified_base 4: mod_base = OTHER; note = 2'-O-methylguanosine-3'- phosphorothioate
  modified_base 5: mod_base = OTHER; note = 2'-O-methylguanosine-3'- phosphorothioate
  modified_base 6: mod_base = OTHER; note = 2'-deoxyadenosine-3'-phosphorothioate
  modified_base 7: mod_base = OTHER; note = 2'-deoxyguanosine-3'-phosphorothioate
  modified_base 8: mod_base = OTHER; note = 2'-deoxyguanosine-3'-phosphorothioate
  modified_base 9: mod_base = OTHER; note = 5'-methyl-deoxycytidine-3'-phosphorothioate
  modified_base 10: mod_base = OTHER; note = 2'-deoxythymidine-3'-phosphorothioate
  modified_base 11: mod_base = OTHER; note = 2'-deoxythymidine-3'-phosphorothioate
  modified_base 12: mod_base = OTHER; note = 2'-deoxyadenosine-3'-phosphorothioate
  modified_base 13: mod_base = OTHER; note = 2'-deoxythymidine-3'-phosphorothioate
  modified_base 14: mod_base = OTHER; note = 2'-deoxythymidine-3'-phosphorothioate
  modified_base 15: mod_base = OTHER; note = 2'-deoxyguanosine-3'-phosphorothioate
  modified_base 16: mod_base = OTHER; note = 2'-O-methyluridine-3'-phosphorothioate
  modified_base 17: mod_base = OTHER; note = 2'-O-methylguanosine-3'- phosphorothioate
  modified_base 18: mod_base = OTHER; note = 2'-O-methylguanosine-3'- phosphorothioate
  modified_base 19: mod_base = OTHER; note = 2'-O-methylcytidine-3'- phosphorothioate
  modified_base 20: mod_base = OTHER; note = 2'-O-methyladenosine-3'-phosphate
  misc_feature 1..5: note = RNA
  misc_feature 6..15: note = DNA
  misc_feature 16..20: note = RNA
tttggaggcttattgtggca

We claim:

1. A single stranded antisense polynucleotide agent for inhibiting expression of angiotensinogen (AGT), wherein the agent comprises about 4 to about 50 contiguous nucleotides, wherein at least one of the contiguous nucleotides is a modified nucleotide, and wherein the nucleotide sequence of the agent is about 80% complementary over its entire length to the equivalent region of the nucleotide sequence of any one of SEQ ID NOs: 1-4.

2. The single stranded antisense polynucleotide agent of claim 1, wherein the equivalent region is any one of the target regions of SEQ ID NO:1 provided in Table.

3. (canceled)

4. A single stranded antisense polynucleotide agent for inhibiting expression of angiotensinogen (AGT), wherein the agent comprises at least 8 contiguous nucleotides differing by no more than 3 nucleotides from any one of the nucleotide sequences listed in Table 3, and wherein the agent is about 8 to about 50 nucleotides in length.

5. (canceled)

6. (canceled)

7. The single stranded antisense polynucleotide agent of claim 1, wherein all of the nucleotides of the single stranded antisense polynucleotide agent comprise a nucleotide modification.

8. The single stranded antisense polynucleotide agent of claim 1, which is 10 to 40 nucleotides in length; 10 to 30 nucleotides in length; 18 to 30 nucleotides in length; 10 to 24 nucleotides in length; 18 to 24 nucleotides in length; or 20 nucleotides in length.

9-14. (canceled)

15. The single stranded antisense polynucleotide agent of claim 1, wherein the nucleotide modifications comprise a modified sugar moiety selected from the group consisting of: a 2′-O-methoxyethyl modified sugar moiety modification, a 2′-methoxy modified sugar moiety modification, a 2′-O-alkyl modified sugar moiety modification, and a bicyclic sugar moiety modification.

16. (canceled)

17. The single stranded antisense polynucleotide agent of claim 1, wherein the nucleotide modifications comprise a 5-methylcytosine.

18. The single stranded antisense polynucleotide agent of claim 1, wherein the nucleotide modifications comprise a modified internucleoside linkage.

19. (canceled)

20. The single stranded antisense polynucleotide agent of claim 1, comprising a plurality of 2′-deoxynucleotides flanked on each side by at least one nucleotide having a modified sugar moiety.

21-34. (canceled)

35. A single stranded antisense polynucleotide agent for inhibiting angiotensinogen (AGT) expression, comprising
a gap segment consisting of linked deoxynucleotides;
a 5′-wing segment consisting of linked nucleotides;
a 3′-wing segment consisting of linked nucleotides;
wherein the gap segment is positioned between the 5′-wing segment and the 3′-wing segment and wherein each nucleotide of each wing segment comprises a modified sugar.

36-40. (canceled)

41. The single stranded antisense polynucleotide agent of claim 1, wherein the agent further comprises a ligand.

42-44. (canceled)

45. A pharmaceutical composition for inhibiting expression of an angiotensinogen (AGT) gene comprising the single stranded antisense polynucleotide agent of claim 1.

46-53. (canceled)

54. A method of inhibiting angiotensinogen (AGT) expression in a cell, the method comprising contacting the cell with the single stranded antisense polynucleotide agent of claim 1, thereby inhibiting expression of the AGT gene in the cell.

55-57. (canceled)

58. A method of treating a subject having a disease or disorder that would benefit from reduction in angiotensinogen (AGT) expression, the method comprising administering to the subject a therapeutically effective amount of the single stranded antisense polynucleotide agent of claim 1, thereby treating the subject.

59-73. (canceled)
